(19) United States
(12) Patent Application Publication
(10) Pub. No.: US 2003/0134278 A1
(43) Pub. Date: Jul. 17, 2003

(54) Chromosome inheritance modifiers and their uses

(76) Inventors: Gary H. Karpen, San Diego, CA (US); Kenneth W. Dobie, Del Mar, CA (US); Kevin R. Cook, Bloomington, IN (US); Terence D. Murphy, Baltimore, MD (US)

Correspondence Address: SCHWEGMAN, LUNDBERG, WOESSNER & KLUTH, P.A., P.O. BOX 2938, MINNEAPOLIS, MN, 55402, US

(21) Appl. No.: 09/949,029

(22) Filed: Sep. 7, 2001

Related U.S. Application Data
(60) Provisional application No. 60/231,178, filed on Sep. 7, 2000.

(51) Int. Cl. C12Q 1/68; C12Q 1/00; A61K 31/00

(52) U.S. Cl. 435/6; 435/4; 514/1

(57) ABSTRACT

The invention provides a method to identify agents and polynucleotides that modulate chromosomal inheritance. The invention also provides polynucleotides isolated according to the method as well as orthologous polynucleotides and expression cassettes and vectors containing the polynucleotides.

### STATEMENT OF GOVERNMENT FUNDING

[0001] At least a part of the invention described in this patent application was funded under a grant from the National Institutes of Health, grant no. RO1-GM54549

### BACKGROUND OF THE INVENTION

[0002] Accurate chromosome inheritance is a dynamic and multifactorial process (Rieder and Salmon, Trends. Cell Biol., 8:310 (1998)). Early in mitotic prophase chromosomes are condensed and sister chromatids are held together at centric heterochromatin. As mitosis progresses the chromosome arms and centromeres associate with microtubules radiating from centrosomes and chromosomes congress to the metaphase plate due to the action of antipoleward forces and motor proteins. The spindle assembly checkpoint apparatus monitors this process and sister chromatids segregate to opposite poles only after all the chromosomes have aligned at the plate. The kinetochore, a specialized proteinaceous structure, is a central focus for checkpoint proteins as well as proteins required for spindle attachment, chromosome congression and segregation (Dobie et al., Curr. Opin. Genet. Dev., 9:206-217 (1999)). While cytokinesis marks the end of mitosis, the chromosomes still have to undergo decondensation and DNA replication before chromosome division can be repeated. A further level of complexity is added in germ cells where homologous chromosomes pair and segregate in meiosis I and sister chromatids remain associated until meiosis II.

[0003] Errors in the above processes can result in aneuploidy which is associated with birth defects such as Down syndrome and most types of tumors (Hook, Aneuploidy: Etiology & Mechanisms, ed. Dellarco et al., New York, Plenum Press (1985); Mitelman, Catalog of Chromosome Aberrations in Cancer, 5th Ed., New York: Wiley (1994)). Studies performed in diverse organisms have been crucial in the identification of genes involved in chromosome inheritance (Pluta et al., Science, 270:1591-1594 (1995)). However, due to the complexity of chromosome architecture and inheritance we are only beginning to scratch the surface in our understanding of the gene products required for chromosome inheritance. A more complete understanding will require the identification and characterization of novel components of chromosome architecture and a deeper understanding of how chromosome movements are governed and orchestrated with the cell cycle. Knowledge of how these processes operate will be essential if we are to understand the relationship between aneuploidy and birth defects or cancer progression, and to diagnose and treat these conditions.

[0004] The fruit fly Drosophila melanogaster is a model system for higher eukaryotic chromosome inheritance. This genetically amenable organism displays diverse types of chromosome cycles and cell divisions. For example, there are multiple rapid divisions without cellularization during early embryonic development, somatic and germ-line mitosis, meiosis I and II and sex-specific patterns of meiosis; chromosome segregation has to be accomplished appropriately through these different types of division to ensure viability and normal function of the organism. Because of this complexity, the centromeres share many structural similarities (e.g., large amount of DNA, kinetochore structure, heterochromatic location and attachment to several microtubules) with mammalian cells which also undergo a gamut of division types. Therefore information derived from studies on chromosome inheritance in Drosophila is relevant to human chromosome inheritance and the causes of aneuploidy.

[0005] Therefore, there is a need for the identification and analysis of genes and proteins involved in chromosome inheritance. There is a further need to develop a cellular model to study effects of pharmaceutical agents upon chromosomal inheritance. A further need is the use the Drosophila genome as a starting point for such a cellular model.

### SUMMARY OF THE INVENTION

[0006] The invention is directed to a method to identify agents, including pharmaceutical agents, that modulate chromosome inheritance. An additional aspect of the invention is a method to diagnose a patient who has, or is at risk for developing, an indication associated with altered chromosome inheritance. A therapeutic method to treat a patient who has, or is at risk for developing, an indication associated with altered chromosome inheritance is also provided. The invention is further directed to one or more polynucleotide(s) at least encoding one or more polypeptide(s) that affect chromosome inheritance. The invention is also directed to polypeptides that affect chromosome inheritance. Another aspect of the invention is a method for identifying a polynucleotide that encodes a polypeptide that affects chromosome inheritance.

[0007] The method to identify agents that modulate chromosomal inheritance according to the invention involves the use of a sensitized minichromosome that functions as a marker of chromosomal inheritance. In particular, the method of the invention includes screening a candidate agent to determine whether the agent modulates chromosome inheritance. The agent may be a pharmaceutical compound, a peptide, a viral agent, a polynucleotide and the like. This method involves obtaining a normal or germ cell line containing a sensitized minichromosome, such as the J21A minichromosome for the Drosophila genome, or a minichromosome marker (hereinafter, modified cells). The minichromosome will be compatible with the cell line into which it is inserted. The candidate agent and such modified cells are contacted together, the modified cells are allowed to combine and/or divide, and the chromosome inheritance pattern of the minichromosome in progeny cells is determined. An alteration in the minichromosome inheritance pattern indicates that the candidate compound modulates chromosome inheritance. This method is useful to screen for candidate agents that favorably affect chromosome inheritance, for example, to screen for pharmaceutical compounds that may be useful to treat cancer. This method can also be useful to screen for candidate agents that unfavorably affect chromosome inheritance, for example, to determine that the pharmaceutical compound identified as a candidate for another purpose is a mutagenic compound.

[0008] The invention is also directed to a method for identifying a polynucleotide of the invention. This method involves determining the inheritance of a sensitized minichromosome in progeny cells following mutagenesis and division of the parent cell. The inheritance of the minichromosome in the progeny cells may additionally be compared to inheritance of the minichromosome in a non-mutagenized cell, wherein an alteration in inheritance of the minichromosome indicates that a mutated polynucleotide affects chromosome inheritance. The polynucleotide can be mutated by various techniques such as, for example, insertion of a genetic construct such as a P element or virus. Alternatively, chemical mutagenesis such as by a chemical, pharmaceutical composition, peptide, polypeptide and the like may be used to mutate a gene of interest. The minichromosome can be, for example, the J21A minichromosome or any of the sensitized minichromosomes described in references described in the “Detailed Description of the Invention.” As mentioned above, these sensitized minichromosomes may also be used in the modified cell line for candidate compound screening. The mutated polynucleotide and the marker can be localized to the same cell, for example, by selective crossing of cell line germ cells, such as from Drosophila. Altered inheritance may be determined, for example, by the monosome transmission assay as described by Cook et al., Genetics, 145:737-747 (1997), and the mutated polynucleotide is characterized, for example by sequencing following inverse PCR. The sequence data can be analyzed, for example, using the Berkeley Drosophila Genome Project (BDGP) WU-BLAST 2.0 and National Center for Biotechnology Information (NCBI) Advanced BLAST servers.

[0009] The polynucleotide(s) and polypeptide(s) discovered according to the invention affect chromosome inheritance. Such polynucleotide(s) and polypeptide(s) may be from any organism from which a cell containing a sensitized minichromosome may be obtained and screened. Such cells include but are not limited to, mammalian, insect, yeast and the like. Such cells include human cells. As described herein below, polynucleotides of the invention may be identified by screening lines of appropriate cells, such as Drosophila, which have mutations in their genome, for altered chromosome inheritance. The majority of the Drosophila lines presented herein have mutations in novel loci, and many of those loci have human homologs. This collection of loci includes novel genes involved in inheritance at several levels of control, such as centromere structure and function, chromosome movement (motor proteins), chromosome architecture (sister chromatid cohesion, condensation and replication) or cell-cycle regulation (checkpoint proteins or the APC). These genes equate with and/or incorporate the polynucleotides of the invention. The polynucleotides include those having the nucleotide sequences listed in SEQ ID NO: 1, 3, 5, 7, 9, 11, 13, 15, 17, 19, 21, 23, 25, 27, 29, 31, 33, 35, 37, 39, 41-43, 47, 49, 51, 53, 55, 57, 59, 61, 63, 65, 67, 69, 71, 73, 75, 77, 79, 81, 83, 85, 86, 89, 91, 92, 95, 97, 99, 101, 103, 105, 107, 109, 110, 113, 114, 117, 119, 121, 123, 125, 127, 129, 131, 133, 135-137, 141, 143, 145, 147-149 and described in Tables 4 and 5. The polynucleotides of the invention also include homologs of the indicated nucleic acid sequences and those described in Tables 4 and 5, i.e., the corresponding polynucleotides in organisms other than Drosophila as well as fragments thereof. Thus, the invention includes an isolated polynucleotide comprising a nucleic acid sequence encoding a polypeptide having at least 70% identity to a polypeptide encoded by one or more of the Drosophila sequences. Additionally, the invention includes an isolated polynucleotide comprising a nucleic acid sequence encoding a polypeptide having a substantially similar function to a polypeptide encoded by one or more of the Drosophila sequences. Databases such GenBank may be employed to identify sequences related to the Drosophila sequences. Alternatively, recombinant DNA techniques such as hybridization or PCR may be employed to identify sequences related to the Drosophila sequences.

[0010] The invention also provides polypeptides encoded by the polynucleotides of the invention. The polypeptides are involved in the control of chromosome segregation, including arrangement and direction during cell division. The polypeptides are characterized by their amino acid given in SEQ ID NO: 2, 4, 6, 8, 10, 12, 14, 16, 18, 20, 22, 24, 26, 28, 30, 32, 34, 36, 38, 40, 44-46, 48, 50, 52, 54, 56, 58, 60, 62, 64, 66, 68, 70, 72, 74, 76, 78, 80, 82, 84, 87, 88, 90, 93, 94, 96, 98, 100, 102, 104, 106, 108, 111, 112, 115, 116, 118, 120, 122, 124, 126, 128, 130, 132, 134, 138-140, 142, 144 and 146 and described in Tables 4 and 5, and by the polynucleotide sequences that code for the corresponding polypeptides. The invention also includes the isolated polypeptides, polypeptides having at least about 70% identity to the polypeptides having the sequences given in SEQ ID NO: 2, 4, 6, 8, 10, 12, 14, 16, 18, 20, 22, 24, 26, 28, 30, 32, 34, 36, 38, 40, 44-46, 48, 50, 52, 54, 56, 58, 60, 62, 64, 66, 68, 70, 72, 74, 76, 78, 80, 82, 84, 87, 88, 90, 93, 94, 96, 98, 100, 102, 104, 106, 108, 111, 112, 115, 116, 118, 120, 122, 124, 126, 128, 130, 132, 134, 138-140, 142, 144 and 146 and described in Tables 4 and 5, as well as fragments and substitutions thereof. Additionally, the invention includes polypeptides having a substantially similar function to the polypeptides having the sequences given in SEQ ID NO: 2, 4, 6, 8, 10, 12, 14, 16, 18, 20, 22, 24, 26, 28, 30, 32, 34, 36, 38, 40, 44-46, 48, 50, 52, 54, 56, 58, 60, 62, 64, 66, 68, 70, 72, 74, 76, 78, 80, 82, 84, 87, 88, 90, 93, 94, 96, 98, 100, 102, 104, 106, 108, 111, 112, 115, 116, 118, 120, 122, 124, 126, 128, 130, 132, 134, 138-140, 142, 144 and 146. The polypeptide fragments may include functional domains, such as binding sites, for example DNA binding. The polypeptides may also include substitutions that include conservative amino acid substitutions as well as non-natural amino acid substitutions. Such substitutions may be made according to the strategy outlined in Proteins-Structure and Molecular Properties, 2d ed., T. E. Creighton, W. H., Freeman and Company, New York (1993); Wold, F., Posttranslational Protein Modifications: Perspectives and Prospects, Posttranslational Covalent Modification of Proteins, 193:1-12 B. C. Johnson, Ed., Academic Press, New York; Seifter et al., Analysis for protein modifications and nonprotein cofactors, Methods in Enzymol, 182:626-646 (1990) and Rattan et al., Protein Synthesis: Posttranslational Modifications and Aging, Ann. N.Y. Acad. Sci., 663:48-62 (1992).

[0011] The invention also provides anti-sense polynucleotides corresponding to the polynucleotides identified as involved in chromosome inheritance. Also provided are expression cassettes, e.g., recombinant vectors, and host cells comprising polynucleotides of the invention.

[0012] An additional aspect of the invention is a method for diagnosing a patient who has, or is at risk for developing, an indication associated with altered chromosome inheritance. This method involves determining the presence of a mutation in a polynucleotide, wherein a mutation in the polynucleotide indicates that the patient has, or is at risk for, an indication associated with altered chromosome inheritance. This method is useful, for example, during genetic counseling.

[0013] A therapeutic method to treat a patient who has, or is at risk for developing, an indication associated with altered chromosome inheritance is also provided. For example, a patient who has, or is at risk for developing, an indication associated with altered chromosome inheritance can be treated with a compound that reduces the effects of the indication. This treatment could include, for example, gene therapy, antisense therapy, or pharmacological therapy.

### BRIEF DESCRIPTION OF THE DRAWINGS

[0014] FIG. 1 shows the dominant interaction between a P element-induced mutation and a sensitized minichromosome. Inheritance of J21A was used as a sensitized assay to detect dominant mutations that affect chromosome inheritance. J21A is only 580 kb and exhibits moderate instability in a monosome transmission assay; it is transmitted to only 27% of the progeny, in comparison to the 50% transmission exhibited by larger, monosomic minichromosomes and 100% transmission for the disomic autosomes and sex chromosomes.

[0015] FIG. 2 illustrates a screen for sensitized chromosome inheritance mutations using P element mutagenesis. (A) A schematic of the Drosophila genome. SUPor-P (Roseman et al., Genetics, 141:1061-1074 (1995)) was mobilized from the CyO chromosome using TMS,Sb 2,3ry⁺. (B) An outline of the multiple generations in the screen. (1) CyOP[y⁺] males containing SUPor-P were crossed with TMS,Sb 2,3ry⁺ virgin females containing the transposase activity. (2) A pilot study demonstrated there was no difference in SUPor-P mobilization frequency between males or females. Therefore we mobilized the SUPor-P from males because CyOP[y⁺];TMS,Sb 2,3ry⁺ males were more convenient to collect than CyOP[y⁺];TMS,Sb 2,3ry⁺ virgin females and y;ry virgin females were relatively plentiful. (3,4) New SUPor-P insertions were collected by selecting for P[y⁺] and against the CyO and TMS chromosomes. (4) X chromosome insertions were recovered by collecting non-virgin females (see materials and methods). This was possible because the non-virgin females remated with y;ry;J21A,ry⁺ males and produced offspring with the appropriate phenotype (5). (3,4) J21A was crossed into the SUPor-P-induced mutant background. (6) Three virgin y⁺;ry⁺ (and therefore containing P[y⁺] and J21A) females were collected for each SUPor-P line and three individual transmission tests were performed by outcrossing each female to y;ry males in individual vials. (7) The average transmission rate was calculated from the three vials. If a line exhibited <22% or >37% ry⁺ transmission then it was retained and retested. (8,9) The retests were essentially a repeat of steps 3 and 6, only with 10-15 vials per line instead of only three. (10) Seventy-eight lines retested with significantly interesting transmission rates. These were established as balanced stocks and subjected to further genetic and molecular analyses.

[0016] FIG. 3 shows P element insertion locations. (A) The ORFs of 19 Drosophila loci are presented. Exons are depicted as boxes; the 5′ UTRs are dark boxes. P elements are represented by triangles and the orientation is indicated by an arrow (5′ to 3′). Loci with two P insertions at an identical position (oaf, sca and eIF-4E) are indicated by a “2” next to the P insertion site. The ORFs are to scale. (B) A map of eight P insertions within a novel 3 kb locus. The P insertion sites and predicted ORF were established by aligning two ESTs and the P insertion flanking sequences with the genomic clone AC019974 (Table 3). The lines are Scim12¹ (51%), Scim12² (21%), Scim12³ (18%), Scim12⁴ (17%), Scim12⁵ (40%), Scim12⁶ (40%), Scim12⁷ (39%) and Scim12⁸ (19%) [left to right].

[0017] FIG. 4 illustrates mitotic chromosome defects in known loci. Wild type metaphase (A), anaphase (B) and interphase (C) figures are presented. The metaphase X, 2 and 3 chromosomes are indicated in panel (A) and the two small dots in the center are the 4 chromosomes. Figures depicting the predominant defects in the mutant lines are presented; rfc4^{Scim13} metaphase (D), and anaphase (E); Gap1^{Scim16.2} metaphase (F) and anaphase (G); eIF-4E^{Scim15.1} metaphase (H) and interphase (I); Rab5^{Scim5} metaphase (colcemid treated) [J]. See text for details and interpretations.

[0018] FIG. 5 illustrates mitotic chromosome defects in novel loci. Representative figures depicting the predominant defects are presented for mutant lines. Scim25 metaphases (A, B) and interphase nucleus (B); Scim9 metaphases (C, D); Scim31 metaphase (E) and anaphase (F); Scim24 metaphases (G, H); Scim1 metaphases (I, J); Scim12⁶ metaphase (colcemid treated) [K]. See text for details and interpretations.

[0019] FIG. 6 shows a model representing processes involved in chromosome inheritance and associated genes recovered in the screen.

### DETAILED DESCRIPTION OF THE INVENTION

[0020] The present invention is founded upon the development of a sensitive minichromosome that acts as a marker of chromosome inheritance for the corresponding cell line. The cell line may be a germ or non-germ cell line that is capable of cell division. The sensitive minichromosome and cell line will be compatible. A cell line carrying the sensitive minichromosome can be challenged with a candidate such as a pharmaceutical agent, peptide, virus and the like. If the challenge causes an alteration in the control mechanisms of chromosome inheritance, an alteration of the inheritance pattern of the sensitive minichromosome will appear in the progeny of the cell line. The alteration then indicates that the candidate favorably affects chromosome inheritance, and would be a desirable anticancer or antiviral agent. Alternatively, the alteration indicates that the candidate causes mutagenesis and would be an undesirable agent for pharmaceutical use. Examples of such minichromosomes and cell lines include the J21A minichromosome from Drosophila as well as the cell lines and minichromosomes characterized in the following references: Au et al., Cytogenet. Cell. Genet., 86:194-203 (1999); Buchowicz, Acta Biochim. Pol., 44(1):13 (1997)(Review); Kapler, Curr. Opin. Genet. Dev., 3(5):730-5 (1993); Crooke et al., Res. Microbiol., 142(2-3):127-30 (1991); Shirakata et al., Virology, 263(1):42-54 (1999); Martino et al., Structure Fold Des., 7(8):1009-22 (1999); Guiducci et al., Hum. Mol. Genet., 8(8):1417-24 (1999). The screen also allows identification of genes and proteins encoded by those genes that are involved in the control and direction of chromosomal inheritance. The Drosophila genome and minichromosome J21A provide a demonstration of the methods and biological materials of the invention.

[0021] Drosophila has a minichromosome Dp(1 ;f)1187 (Dp 1187) that may be useful for the study of chromosome inheritance. Dp1187 is derived from the X chromosome and is not required for viability (Murphy and Karpen, Cell, 82:599-609 (1995b); Williams et al., Nature Genetics, 18:30-37 (1998)). It is only 1.3 Mb, it is transmitted normally through mitosis and meiosis, and it binds known kinetochore proteins, demonstrating that it contains a fully functional centromere. The relatively small size of the minichromosome has enabled detailed restriction mapping of the entire minichromosome using pulsed-field gel electrophoresis and Southern analysis (Le et al., Genetics, 141:283-303 (1995); Sun et al., Cell, 91:1007-1019 (1997)). Gamma irradiation mutagenesis, in combination with the above techniques, has enabled the identification of a 420 kb region within Dp1187 that is essential for normal chromosome transmission (Murphy and Karpen, Cell, 82:599-609 (1995b); Sun et al., Cell, 91:1007-1019 (1997)). Irradiation mutagenesis of Dp1187 generated the 580 kb J21A derivative (Murphy and Karpen, Cell, 82:599-609 (1995b); Sun et al., Cell, 91:1007-1019 (1997)). J21A contains only 290 kb of centric heterochromatin, corresponding to two-thirds of the cis-acting DNA sequences required for normal inheritance, and is inherited only half as well as larger derivatives. Previous studies demonstrated that J21A transmission is affected by a heterozygous mutant background for genes required for inheritance while the inheritance of normal chromosomes is unaffected (Murphy and Karpen, Cell, 81, 139-148 (1995a); Cook et al., Genetics, 145:737-747 (1997). This demonstrated that J21A is sensitized for detecting proteins involved in inheritance. The small size of J21A per se likely predisposes sensitivity in a mutant background in several ways including sensitivity to spindle components (Murphy and Karpen, Cell, 81:139-148 (1995a); Cook et al., Genetics, 145:737-747 (1997)), sister chromatid cohesion (Lopez et al. in press) and overall chromosome architecture.

[0022] I. Definitions

[0023] An “agent” can be a chemical, drug, pharmaceutical composition, polypeptide and the like that modulates chromosomal inheritance.

[0024] A “detectable marker” includes any trait that may be screened or selected for, such as expression of a fluorescent protein, drug resistance or the like.

[0025] The term “modulate” or “modulates” means an increase or decrease in the occurrence of an event. For example, an agent that modulates chromosomal inheritance in a cell will either increase or decrease chromosomal inheritance in progeny of cells treated with the agent.

[0026] The terms “polypeptide,” “protein,” “peptide” are used interchangeably herein.

[0027] The term “polynucleotide” or “nucleic acid sequence” are used interchangeably herein and mean an isolated nucleic acid segment. The term encompasses nucleic acid sequences that may be either RNA or DNA.

[0028] A “sensitized minichromosome” is a nucleic acid construct that undergoes chromosomal segregation during cell division. Examples of sensitized minichromosomes include, but are not limited to, Dp1187 and J212A. Sensitized minichromosomes of the invention also include nucleic acid constructs having a minimal functional centromere.

[0029] The term “substantially similar” refers to nucleotide and amino acid sequences that represent equivalents of the instant inventive sequences. For example, altered nucleotide sequences which simply reflect the degeneracy of the genetic code but nonetheless encode amino acid sequences that are identical to the inventive amino acid sequences are substantially similar to the inventive sequences. In addition, amino acid sequences that are substantially similar to the instant sequences are those wherein overall amino acid identity is 95% or greater to the instant sequences. Modifications to the instant invention that result in equivalent nucleotide or amino acid sequences is well within the routine skill in the art. Moreover, the skilled artisan recognizes that equivalent nucleotide sequences encompassed by this invention can also be defined by their ability to hybridize, under stringent conditions (0.1×SSC, 0.1% SDS, 65° C.), with the nucleotide sequences that are within the literal scope of the instant claims.

[0030] II. A Method to Screen for at Least one Agent that Modulates Chromosomal Inheritance

[0031] The invention provides a method to screen for an agent that modulates chromosomal inheritance. The method involves contacting a cell that contains a sensitized minichromosome with a candidate agent and determining if the candidate agent increases or decreases inheritance of the minichromosome in progeny of the treated cell.

[0032] Sensitized minichromosome: Sensitized minichromosomes for use in the method include the minichromosome Dp1187 and the J21A derivative described herein. Additionally, sensitized minichromosomes may be produced through recombinant methods. These methods are well known in the art and are described within Sambrook et al., Molecular Cloning: A Laboratory Manual (2d ed., Cold Spring Harbor Laboratory Press, Plainview, N.Y.) (1989). Such minichromosomes may be exemplified by those having the 420 Kb region of Dp1187 or the 290 Kb region of J21A cloned into a vector backbone to form a recombinant minichromosome that is heritable. The recombinant minichromosomes may also contain a minimal element that provides for inheritance of the minichromosome. Methods for isolation of minimal elements required for chromosomal segregation and which confer inheritance on a vector sequence are within the skill of the art in light of the disclosure herein. Sensitized minichromosomes may also include genes that encode selection markers or marker genes. Such selection markers include those that confer resistance to a chemical, such as a drug. Such markers and methods are well know in the art. Sensitized minichromosomes may also include marker genes that express a detectable product. Examples of such gene products include fluorescent proteins, such as green fluorescent protein, red fluorescent protein, yellow fluorescent protein, cyan fluorescent protein and the like.

[0033] Cells for use in the method: Any cell may be used within the assay method that is compatible with a sensitized minichromosome. Such cells may be germ-line or non-germ line cells. Additionally, cells may be obtained from a multitude of organisms, such as mammals, insects, yeast and the like. Examples of cells in common use include 3T3, BHK21, MDCK, HeLa, PtK1, L6 PC12 and SP2 cells. Additional cells may be obtained from the American Type Culture Collection. Hay et al., eds., American Type Culture Collection Catalogue of Cell Lines and Hybridomas, 6th ed. Rockville, Md.: American Type Culture Collection, 1988. These cells can be grown under any condition that allows them to divide. Cell and tissue culture conditions are well known in the art. Ham, Proc. Natl. Acad. Sci. USA, 53:288 (1965); Loo et al., Science, 236:200 (1987); Sato et al., eds. Growth of Cells in Hormonally Defined Media. Cold Spring Harbor, N.Y.: Cold Spring Harbor Laboratory (1982).

[0034] Methods for detecting inheritance of the minichromosome: Many methods may be used within the method to detect inheritance of a sensitized minichromosome. Such methods include, but are not limited to, fluorescent in situ hybridization (FISH), drug resistance, fluorescence and the like. The detection methods may involve lysis of the cell or may involve analysis of a whole cell or cells. In one embodiment of the method, cells may be contacted with a candidate agent and then the inheritance of a sensitized minichromosome may be determined through lysis of the cells and hybridization with a probe that is specific to the minichromosome. Probes may be prepared that are labeled in a variety of ways that include fluorescence, radiolabel, antibody label or many other art recognized methods. Detection methods in such cases include, but are not limited to, use of fluorescent microscopy, autoradiography, phosphorimaging, and the like. In another embodiment, the sensitized minichromosome expresses a fluorescent gene product, such as green fluorescent protein (GFP), yellow fluorescent protein (YFP), cyan fluorescent protein (CFP) and the like. Inheritance of the minichromosome may be determined through detecting fluorescence of the gene product in progeny of the treated cell through use of fluorescent microscopy or fluorescence activated cell sorting (FACS). In another embodiment of the invention, drug resistance may be used to determine inheritance of the sensitized minichromosome. This may be done by treating a cell containing a sensitized minichromosome that confers drug resistance with a candidate agent. A portion of the progeny of the treated cell are then plated on a plate containing a selective drug and on a plate lacking the selective drug. Inheritance of the drug may be determined by comparing the number of colonies on the plate lacking the selective drug compared to the number of colonies on the plate containing the drug. One of skill in the art will recognize that the invention encompasses a multitude of art recognized methodologies that can be used to detect a minichromosome that may be used according to the method.

[0035] Agents: Agents include chemical, biological, or physical agents. It is contemplated that the inventive method may be used to identify agents useful for treatment of disease or afflictions related to abnormal chromosomal inheritance. Examples of chemical agents include, but are not limited to, pharmaceuticals and pharmaceutical compositions. Biological agents are exemplified by gene therapy agents, therapeutic polypeptides, anti-sense constructs and the like. Physical agents include light, ionizing radiation, electromagnetic radiation and the like. It is also contemplated that the inventive method may be used as a screen for agents, such as chemicals, pharmaceuticals, and other therapies to ensure that the agents do not adversely affect chromosomal inheritance.

[0036] The above described methods are illustrative of the many ways in which inheritance of a sensitized minichromosome may be determined and are not meant to be limiting in any way.

[0037] III. A Method for Diagnosing a Patient who has, or who is at Risk of Developing an Indication Associated with Altered Chromosome Inheritance

[0038] The invention provides a method for determining if a patient has a mutated gene that may predispose them or their progeny to development of genetic disease. Such information is useful for purposes of genetic counseling. The method involves screening a patient for deleterious mutations occurring in genes involved with chromosomal inheritance. Such genes are described herein and may also be identified according to the methods described herein.

[0039] Methods for identifying mutations in nucleic acid sequences are well known in the art. Briefly, a nucleic acid sample can be obtained from a patient through collection and extraction of a tissue or bodily fluid sample, such as blood. The collected nucleic acid may then be probed to detect the presence of a mutation. Examples of methods to detect mutations in isolated nucleic acids include, sequencing, digestion with restriction enzymes, polymerase chain reaction, nucleic acid hybridization and the like.

[0040] The invention describes nucleic acid sequences, polypeptides, and methods for identifying additional genes involved with chromosomal inheritance that may be used in conjunction with the diagnostic method. For example, the nucleic acid sequences disclosed herein, and orthologs thereof, may be used as probes to screen patients for mutations in genes involved with inheritance. Alternatively, the nucleic acid sequence of the genes and orthologs identified herein may be compared to the sequence of nucleic acid isolated from a patient to determine if the patient has an alteration in a gene involved with chromosomal inheritance.

[0041] IV. A Method to Treat a Patient who has, or is at Risk for Developing an Indication Associated with Altered Chromosomal Inheritance

[0042] The invention provides a method to treat a patient having an affliction associated with altered chromosomal inheritance or to lessen the risk of onset of an affliction associated with altered chromosomal inheritance. The method involves administering an agent that affects inheritance of a chromosome to the patient in need thereof. Such an agent may be identified according to the methods disclosed herein. Agents of the invention include chemicals, pharmaceutical compositions, gene therapy agents and the like.

[0043] Gene therapy agents: In one embodiment of the invention, a gene therapy agent able to express a polypeptide involved in chromosomal inheritance is administered to a patient identified as having reduced expression of the polypeptide in the form of a vector. Vectors include, but are not limited to, a plasmid, a phagemid, a raus sarcoma virus (RSV) vector or an adenoviral vector. In addition, a variety of viral vectors, such as retroviral vectors, herpes simplex virus (U.S. Pat. No. 5,288,641), cytomegalovirus, and the like may be employed. Recombinant adeno-associated virus (AAV) and AAV vectors may also be employed, such as those described in U.S. Pat. No. 5,139,941. Techniques for preparing replication-defective infective viruses are well known in the art, as exemplified by Ghosh-Choudhury and Graham, Biochem. Biophys. Res. Comm., 147:964 (1987); McGrory et al., Virology, 163:614 (1988); and Gluzman et al., Eukaryotic Viral Vectors, Gluzman ed., pp. 187-192, Cold Spring Harbor Press, Cold Spring Harbor, N.Y. (1982). Plasmid vectors may also be used. Tripathy et al., Proc. Natl. Acad. Sci. USA, 93:10876 (1996).

[0044] A replication-defective adenovirus that may be used in the practice of the present invention. An example of a replication-defective adenovirus is one that lacks the early gene region E1 or the early gene regions E1 and E3. The DNA of interest, such as a promoter and a gene of the present invention, may be inserted into the region of the deleted E1 and E3 regions of the adenoviral genome. In this way, the entire sequence is capable of being packaged into virions that can transfer the inserted DNA into an injectable host cell.

[0045] The vector of the present invention may be dispersed in a pharmaceutically acceptable solution. Such solutions include neutral saline solutions buffered with phosphate, lactate, Tris, and the like. Vectors may be purified through use of buoyant density gradients, such as cesium chloride gradient centrifugation, through use of gel filtration chromatography or filter sterilization.

[0046] Formulations of compounds: In cases where compounds such as the polypeptides of the invention or those pharmaceutical compounds that modulate the action of the polypeptides of the invention are sufficiently basic or acidic to form stable nontoxic acid or base salts, administration of the compounds as salts may be appropriate. Examples of pharmaceutically acceptable salts are organic acid addition salts formed with acids that form a physiological acceptable anion, for example, tosylate, methanesulfonate, acetate, citrate, malonate, tartarate, succinate, benzoate, ascorbate, a-ketoglutarate, and a-glycerophosphate. Suitable inorganic salts may also be formed, including hydrochloride, sulfate, nitrate, bicarbonate, and carbonate salts.

[0047] Pharmaceutically acceptable salts are obtained using standard procedures well known in the art, for example by reacting a sufficiently basic compound such as an amine with a suitable acid affording a physiologically acceptable anion. Alkali metal (for example, sodium, potassium or lithium) or alkaline earth metal (for example calcium) salts of carboxylic acids also are made. The compounds may be formulated as pharmaceutical compositions and administered to a mammalian host, such as a human patient in a variety of forms adapted to the chosen route of administration, i.e., orally or parenterally, by intravenous, intramuscular, topical or subcutaneous routes.

[0048] Thus, the present compounds may be systemically administered, e.g., orally, in combination with a pharmaceutically acceptable vehicle such as an inert diluent or an assimilable edible carrier. They may be enclosed in hard or soft shell gelatin capsules, may be compressed into tablets, or may be incorporated directly with the food of the patient's diet. For oral therapeutic administration, the active compound may be combined with one or more excipients and used in the form of ingestible tablets, buccal tablets, troches, capsules, elixirs, suspensions, syrups, wafers, and the like. Such compositions and preparations should contain at least 0.1% of active compound. The percentage of the compositions and preparations may, of course, be varied and may conveniently be between about 2 to about 60% of the weight of a given unit dosage form. The amount of active compound in such therapeutically useful compositions is such that an effective dosage level will be obtained. The tablets, troches, pills, capsules, and the like may also contain the following: binders such as gum tragacanth, acacia, corn starch or gelatin; excipients such as dicalcium phosphate; a disintegrating agent such as corn starch, potato starch, alginic acid and the like; a lubricant such as magnesium stearate; and a sweetening agent such as sucrose, fructose, lactose or aspartame or a flavoring agent such as peppermint, oil of wintergreen, or cherry flavoring may be added. When the unit dosage form is a capsule, it may contain, in addition to materials of the above type, a liquid carrier, such as a vegetable oil or a polyethylene glycol. Various other materials may be present as coatings or to otherwise modify the physical form of the solid unit dosage form. For instance, tablets, pills, or capsules may be coated with gelatin, wax, shellac or sugar and the like. A syrup or elixir may contain the active compound, sucrose or fructose as a sweetening agent, methyl and propylparabens as preservatives, a dye and flavoring such as cherry or orange flavor. Of course, any material used in preparing any unit dosage form should be pharmaceutically acceptable and substantially non-toxic in the amounts employed. In addition, the active compound may be incorporated into sustained-release preparations and devices.

[0049] The active compound may also be administered intravenously or intraperitoneally by infusion or injection. Solutions of the active compound or its salts may be prepared in water, optionally mixed with a nontoxic surfactant. Dispersions can also be prepared in glycerol, liquid polyethylene glycols, triacetin, and mixtures thereof and in oils. Under ordinary conditions of storage and use, these preparations contain a preservative to prevent the growth of microorganisms.

[0050] The pharmaceutical dosage forms suitable for injection or infusion can include sterile aqueous solutions or dispersions or sterile powders comprising the active ingredient that are adapted for the extemporaneous preparation of sterile injectable or infusible solutions or dispersions, optionally encapsulated in liposomes. In all cases, the ultimate dosage form should be sterile, fluid and stable under the conditions of manufacture and storage. The liquid carrier or vehicle can be a solvent or liquid dispersion medium comprising, for example, water, ethanol, a polyol (for example, glycerol, propylene glycol, liquid polyethylene glycols, and the like), vegetable oils, nontoxic glyceryl esters, and suitable mixtures thereof. The proper fluidity can be maintained, for example, by the formation of liposomes, by the maintenance of the required particle size in the case of dispersions or by the use of surfactants. The prevention of the action of microorganisms can be brought about by various antibacterial and antifungal agents, for example, parabens, chlorobutanol, phenol, sorbic acid, thimerosal, and the like. In many cases, it will be preferable to include isotonic agents, for example, sugars, buffers or sodium chloride. Prolonged absorption of the injectable compositions can be brought about by the use in the compositions of agents delaying absorption, for example, aluminum monostearate and gelatin.

[0051] Sterile injectable solutions are prepared by incorporating the active compound in the required amount in the appropriate solvent with various of the other ingredients enumerated above, as required, followed by filter sterilization. In the case of sterile powders for the preparation of sterile injectable solutions, the preferred methods of preparation are vacuum drying and the freeze drying techniques, which yield a powder of the active ingredient plus any additional desired ingredient present in the previously sterile-filtered solutions.

[0052] For topical administration, the present compounds may be applied in pure form, i.e., when they are liquids. However, it will generally be desirable to administer them to the skin as compositions or formulations, in combination with a dermatologically acceptable carrier, which may be a solid or a liquid.

[0053] Useful solid carriers include finely divided solids such as talc, clay, microcrystalline cellulose, silica, alumina and the like. Useful liquid carriers include water, alcohols or glycols or water-alcohol/glycol blends, in which the present compounds can be dissolved or dispersed at effective levels, optionally with the aid of non-toxic surfactants. Adjuvants such as fragrances and additional antimicrobial agents can be added to optimize the properties for a given use. The resultant liquid compositions can be applied from absorbent pads, used to impregnate bandages and other dressings, or sprayed onto the affected area using pump-type or aerosol sprayers.

[0054] Thickeners such as synthetic polymers, fatty acids, fatty acid salts and esters, fatty alcohols, modified celluloses or modified mineral materials can also be employed with liquid carriers to form spreadable pastes, gels, ointments, soaps, and the like, for application directly to the skin of the user. Examples of useful dermatological compositions that can be used to deliver the compounds of the present invention to the skin are known to the art; for example, see Jacquet et al. (U.S. Pat. No. 4,608,392), Geria (U.S. Pat. No. 4,992,478), Smith et al. (U.S. Pat. No. 4,559,157) and Wortzman (U.S. Pat. No. 4,820,508).

[0055] Useful dosages of the compounds of the present invention can be determined by comparing their in vitro activity, and in vivo activity in animal models. Methods for the extrapolation of effective dosages in mice, and other animals, to humans are known to the art; for example, see U.S. Pat. No. 4,938,949.

[0056] Generally, the concentration of the compound(s) of the present invention in a liquid composition, such as a lotion, will be from about 0.1-25 wt-%, preferably from about 0.5-10 wt-%. The concentration in a semi-solid or solid composition such as a gel or a powder will be about 0.1-5 wt-%, preferably about 0.5-2.5 wt-%.

[0057] The amount of the compound, or an active salt or derivative thereof, required for use in treatment will vary not only with the particular salt selected but also with the route of administration, the nature of the condition being treated and the age and condition of the patient and will be ultimately at the discretion of the attendant physician or clinician. In general, however, a suitable dose will be in the range of from about 0.5 to about 100 mg/kg, e.g., from about 10 to about 75 mg/kg of body weight per day, such as 3 to about 50 mg per kilogram body weight of the recipient per day, preferably in the range of 6 to 90 mg/kg/day, most preferably in the range of 15 to 60 mg/kg/day.

[0058] The compound is conveniently administered in unit dosage form; for example, containing 5 to 1000 mg, conveniently 10 to 750 mg, most conveniently, 50 to 500 mg of active ingredient per unit dosage form.

[0059] Ideally, the active ingredient should be administered to achieve peak plasma concentrations of the active compound of from about 0.5 to about 75 mM, preferably, about 1 to 50 mM, most preferably, about 2 to about 30 mM. This may be achieved, for example, by the intravenous injection of a 0.05 to 5% solution of the active ingredient, optionally in saline, or orally administered as a bolus containing about 1-100 mg of the active ingredient. Desirable blood levels may be maintained by continuous infusion to provide about 0.01-5.0 mg/kg/hr or by intermittent infusions containing about 0.4-15 mg/kg of the active ingredient(s).

[0060] The desired dose may conveniently be presented in a single dose or as divided doses administered at appropriate intervals, for example, as two, three, four or more sub-doses per day. The sub-dose itself may be further divided, e.g., into a number of discrete loosely spaced administrations; such as multiple inhalations from an insufflator or by application of a plurality of drops into the eye.

[0061] V. A Method to Identify Polynucleotides Involved with Chromosome Inheritance

[0062] The invention provides a method to identify polynucleotides involved with chromosome inheritance determined through use of a sensitized minichromosome.

[0063] In one embodiment, the method involves mutagenizing a cell that contains a sensitized minichromosome and determining if inheritance of the minichromosome is affected by mutagenesis. If inheritance of the minichromosome is increased or decreased following mutagenesis, the mutagenized polynucleotide producing the alteration can be identified through use of an art recognized method. In another embodiment of the method, a sensitized minichromosome is introduced into a mutagenized cell and inheritance of the minichromosome in the progeny of the mutagenized cell is compared to the inheritance of the minichromosome in a non-mutagenized control cell. If the inheritance of the minichromosome in the mutagenized cell is increased or decreased relative to inheritance in the non-mutagenized control cell, the mutagenized polynucleotide producing the alteration is identified according to art recognized methods. In yet another embodiment of the method, a nucleic acid construct, such as a plasmid containing a gene of interest or a genomic or cDNA library, may be mutagenized in vitro and then introduced into a modified cell that contains a sensitized minichromosome. Inheritance of the minichromosome in the progeny of the modified cell is then determined as described above. Use of such a method allows for the identification of mutants that dominantly interfere with cellular machinery involved with chromosomal inheritance. Methods to mutagenize nucleic acids in vitro are well known in the art. (Greenfield et al., Biochim. Biophys. Acta., 407:365 (1985); Botstein and Shortle, Science, 229:1193 (1985)).

[0064] Examples and descriptions of cells and minichromosomes suitable for use according to the method are described herein (Section II).

[0065] Cells may be mutagenized according to many methods well known in the art. These methods include, but are not limited to, use of chemical mutagenesis, ultraviolet light, radiation, viral infection and the like. Such methods are further explained and described in the examples section included herein.

[0066] Methods to identify mutated polynucleotides: Methods to identify mutated polynucleotides are well known in the art. For example, one can introduce a library, such as a cDNA or genomic library, into mutated cells that display altered inheritance of a sensitized minichromosome and then select for cells that display a reverted phenotype based on minichromosome inheritance. The complementing polynucleic acid clone can then be recovered and sequenced to identify the polynucleotide responsible for the reverted phenotype. Another method for isolating a polynucleotide that is involved with chromosomal inheritance is to use an integrating virus to mutagenize the modified cell and to then isolate the polynucleotide of interest based on localization of the virus sequence. This viral sequence can be isolated through use of standard techniques, such as polymerase chain reaction, hybridization with probes that recognize the viral sequence, and other like methods. Such methods are well known in the art and are included within the scope of the invention. Once a polynucleotide is identified, a corresponding functional polynucleotide can be introduced into the mutagenized cell to compliment the inheritance phenotype and confirm the identity of the polynucleotide as one involved in chromosomal inheritance. Other methods for identifying polynucleotides are disclosed within the examples.

[0067] VI. Polynucleotides and Constructs Containing the Polynucleotides as well as Polypeptides of the Invention

[0068] The invention provides isolated polynucleotides involved with chromosomal inheritance as well as expression cassettes and vectors containing the polynucleotides. Accordingly, the invention also provides polypeptides involved with chromosomal inheritance.

[0069] Polynucleotides and polypeptides: The polynucleotides of the invention include those listed in SEQ ID NO: 1, 3, 5, 7, 9, 11, 13, 15, 17, 19, 21, 23, 25, 27, 29, 31, 33, 35, 37, 39, 41-43, 47, 49, 51, 53, 55, 57, 59, 61, 63, 65, 67, 69, 71, 73, 75, 77, 79, 81, 83, 85, 86, 89, 91, 92, 95, 97, 99, 101, 103, 105, 107, 109, 110, 113, 114, 117, 119, 121, 123, 125, 127, 129, 131, 133, 135-137, 141, 143, 145 and 147-149. The invention also provides polynucleotides having 70% or greater sequence identity to the polynucleotides listed in SEQ ID NO: 1, 3, 5, 7, 9, 11, 13, 15, 17, 19, 21, 23, 25, 27, 29, 31, 33, 35, 37, 39, 41-43, 47, 49, 51, 53, 55, 57, 59, 61, 63, 65, 67, 69, 71, 73, 75, 77, 79, 81, 83, 85, 86, 89, 91, 92, 95, 97, 99, 101, 103, 105, 107, 109, 110, 113, 114, 117, 119, 121, 123, 125, 127, 129, 131, 133, 135-137, 141, 143, 145 and 147-149. In another embodiment, the invention provides polynucleotides having 80% or greater sequence identity to the polynucleotides listed in SEQ ID NO: 1, 3, 5, 7, 9, 11, 13, 15, 17, 19, 21, 23, 25, 27, 29, 31, 33, 35, 37, 39, 41-43, 47, 49, 51, 53, 55, 57, 59, 61, 63, 65, 67, 69, 71, 73, 75, 77, 79, 81, 83, 85, 86, 89, 91, 92, 95, 97, 99, 101, 103, 105, 107, 109, 110, 113, 114, 117, 119, 121, 123, 125, 127, 129, 131, 133, 135-137, 141, 143, 145 and 147-149. In yet another embodiment, the invention provides polynucleotides having 90% or greater sequence identity to the polynucleotides listed in SEQ ID NO: 1, 3, 5, 7, 9, 11, 13, 15, 17, 19, 21, 23, 25, 27, 29, 31, 33, 35, 37, 39, 41-43, 47, 49, 51, 53, 55, 57, 59, 61, 63, 65, 67, 69, 71, 73, 75, 77, 79, 81, 83, 85, 86, 89, 91, 92, 95, 97, 99, 101, 103, 105, 107, 109, 110, 113, 114, 117, 119, 121, 123, 125, 127, 129, 131, 133, 135-137, 141, 143, 145 and 147-149. The invention also provides polynucleotides that encode polypeptides having substantially similar function to a polypeptide encoded by a polynucleotide listed in SEQ ID NO: 1, 3, 5, 7, 9, 11, 13, 15, 17, 19, 21, 23, 25, 27, 29, 31, 33, 35, 37, 39, 41-43, 47, 49, 51, 53, 55, 57, 59, 61, 63, 65, 67, 69, 71, 73, 75, 77, 79, 81, 83, 85, 86, 89, 91, 92, 95, 97, 99, 101, 103, 105, 107, 109, 110, 113, 114, 117, 119, 121, 123, 125, 127, 129, 131, 133, 135-137, 141, 143, 145 and 147-149. Such polynucleotides include orthologous polynucleotides isolated from other organisms, such as humans.

[0070] The polynucleotides of the invention include polynucleotides having mutations in these sequences that encode the same amino acids due to the degeneracy of the genetic code. For example, the amino acid threonine is encoded by ACU, ACC, ACA and ACG. It is intended that the invention includes all variations of the polynucleotides of SEQ ID NO: 1, 3, 5, 7, 9, 11, 13, 15, 17, 19, 21, 23, 25, 27, 29, 31, 33, 35, 37, 39, 41-43, 47, 49, 51, 53, 55, 57, 59, 61, 63, 65, 67, 69, 71, 73, 75, 77, 79, 81, 83, 85, 86, 89, 91, 92, 95, 97, 99, 101, 103, 105, 107, 109, 110, 113, 114, 117, 119, 121, 123, 125, 127, 129, 131, 133, 135-137, 141, 143, 145 and 147-149 that encode the same amino acids. Such mutations are known in the art (Watson et al., Molecular Biology of the Gene, Benjamin Cummings, 1987). Mutations also include alteration of a polynucleotide to encode for conservative amino acid substitutions.

[0071] Conservative amino acid substitutions include groupings based on side chains. Members in each group can be substituted for one another. For example, a group of amino acids having aliphatic side chains is glycine, alanine, valine, leucine, and isoleucine. These may be substituted for one another. A group of amino acids having aliphatic-hydroxyl side chains is serine and threonine. A group of amino acids having amide-containing side chains is asparagine and glutamine. A group of amino acids having aromatic side chains is phenylalanine, tyrosine, and tryptophan. A group of amino acids having basic side chains is lysine, arginine, and histidine. A group of amino acids having sulfur-containing side chains is cysteine and methionine. For example, replacement of a leucine with an isoleucine or valine, an aspartate with a glutamate, a threonine with a serine, or a similar replacement of an amino acid with a structurally related amino acid may be accomplished to produce a mutant polypeptide of the invention.

[0072] Expression cassettes and vectors: A polynucleotide of the invention can be inserted into an expression cassette or a recombinant expression vector. An expression cassette refers to a DNA sequence capable of directing expression of a particular nucleotide sequence in an appropriate host cell, comprising a promoter operably linked to the polynucleotide of interest. The expression cassette may also comprise a termination sequence operably linked to the polynucleotide of interest. A recombinant expression vector generally refers to a plasmid, virus or other vehicle known in the art that has been manipulated by insertion or incorporation of a polynucleotide. For example, a recombinant expression vector of the invention includes a polynucleotide encoding a polypeptide that affects chromosomal inheritance. The expression vector typically contains an origin of replication, a promoter, as well as genes which allow phenotypic selection of a cell transformed with the vector. Vectors suitable for use in the present invention include, but are not limited to, the T7-based expression vector for expression in bacteria (Rosenberg et al., Gene, 56:125 (1987)), the pMSXND expression vector for expression in mammalian cells (Lee and Nathans, J. Biol. Chem., 263:3521 (1988)) and baculovirus-derived vectors for expression in insect cells. The polynucleotides of the invention can also be expressed in plant cells using vectors such as cauliflower mosaic virus (CaMV) and tobacco mosaic virus (TMV). The construction of expression vectors and the expression of genes in transfected cells involves the use of molecular cloning techniques that are well known in the art. (Sambrook et al., Molecular Cloning—A Laboratory Manual, Cold Spring Harbor Laboratory, Cold Spring Harbor, N.Y., 1989; and Current Protocols in Molecular Biology, M. Ausubel et al., eds., (Current Protocols, a joint venture between Greene Publishing Associates, Inc. and John Wiley & Sons, Inc., most recent Supplement)). These methods include in vitro recombinant DNA techniques, synthetic techniques and in vivo recombination. (Maniatis, et al., Molecular Cloning A Laboratory Manual, Cold Spring Harbor Laboratory, N.Y., 1989).

[0073] An insect cell based expression system may also be used to express the polynucleotides of the invention. In one such system, Autographa californica nuclear polyhedrosis virus (AcNPV) is used as a vector to express foreign polynucleotides. The virus grows in Spodoptera frugiperda cells. The polynucleotide encoding a polypeptide of the invention may be cloned into non-essential regions (for example, the polyhedrin gene) of the virus and placed under control of an AcNPV promoter (for example the polyhedrin promoter). Successful insertion of the sequences coding for a polypeptide of the invention will result in inactivation of the polyhedrin gene and production of non-occluded recombinant virus (i.e., virus lacking the proteinaceous coat coded for by the polyhedrin gene). These recombinant viruses can then be used to infect S. frugiperda cells in which the inserted gene is expressed. (Smith et al., J. Viol., 46:584 (1983); Smith, U.S. Pat. No. 4,215,051).

[0074] The vectors of the invention can be used to transform a host cell by methods well known in the art such as viral infection, electroporation, CaCl₂ or PEG transformation. By transform or transformation is meant a permanent or transient genetic change induced in a cell following incorporation of a new polynucleotide (i.e., nucleic acid exogenous to the cell). A permanent genetic change may be achieved by insertion of the polynucleotide into the genome of the cell through mechanism such as viral integration or homologous recombination. These methods may be used in many cell types that include, but are not limited to, mammalian, insect, plant, bacterial, yeast and the like.

[0075] Mammalian cell systems which utilize recombinant viruses or viral elements to direct expression of an operably linked polynucleotide may be engineered. For example, when using adenovirus expression vectors, a polynucleotide of the invention may be ligated to an adenovirus transcription/translation control complex e.g., the late promoter and tripartite leader sequence. This chimeric sequence may then be inserted in the adenovirus genome by in vitro or in vivo recombination. Insertion in a non-essential region of the viral genome (e.g., region E1 or E3) will result in a recombinant virus that is viable and capable of expressing a polypeptide of the invention in infected hosts (Logan & Shenk, Proc. Natl Acad. Sci. USA, 81:3655-3659 (1984)). Alternatively, the vaccinia virus 7.5K promoter may be used. (Mackett et al., Proc. Natl. Acad. Sci. USA, 79:7415-7419 (1982); Mackett et al., J. Virol., 49:857-864 (1984); Panicali et al., Proc. Natl. Acad. Sci. USA, 79:4927-4931 (1982)). Vectors based on bovine papilloma virus may also be used which have the ability to replicate as extrachromosomal elements. (Sarver et al., Mol. Cell. Biol., 1:486 (1981)). These vectors are capable of a very high level of expression. Alternatively, a retrovirus can be modified for use as a vector capable of introducing and directing the expression of a polynucleotide of the invention in host cells. (Cone & Mulligan, Proc. Natl. Acad. Sci. USA, 81:6349-6353 (1984)). The herpes virus can also be used a vector. The use of herpes simplex virus vectors is well known in the art and has been described. (Glorioso et al., Annu. Rev. Microbiol., 49:675-710 (1995); U.S. Pat. No. 6,106,826).

[0076] Antisense constructs and expression cassettes and vectors able to produce an antisense message are also provided by the invention. These antisense constructs can be according to methods well known in the art and described herein. (Sambrook et al., Molecular Cloning: A Laboratory Manual, Cold Spring Harbor Laboratory, Cold Spring Harbor, N.Y. (1989); Current Protocols in Molecular Biology, M. Ausubel et al., eds., (Current Protocols, a joint venture between Greene Publishing Associates, Inc. and John Wiley & Sons, Inc., most recent Supplement); Burden-Gulley and Brady-Kalnay, J. Cell Biol., 144:1323-1336 (1999)). Briefly, a polynucleotide of the invention may be placed into an expression vector such that the polynucleotide is in reverse orientation relative to the promoter causing transcription of an antisense message. These antisense messages can be used to inhibit the expression of a selected gene through inhibition resulting from duplex formation between the antisense and sense message.

[0077] The invention is described with reference to various specific and preferred embodiments and techniques. It should be understood, however, that many variations and modifications may be made while remaining within the scope of the invention.

### EXAMPLES

### Materials and Methods

[0078] Drosophila stocks and culture: The SM1 and TM3 balancer chromosome and y;ry stocks are described by Cook et al., Genetics, 145:737-747 (1997)). The strain containing the SUPor-P (suppressor-P) element on the CyO balancer chromosome is described by Roseman et al., Genetics, 141:1061-1074 (1995). The P element was mobilized using P[ry⁺2-3](99B) transposase on the TMS balancer chromosome (Robertson et al., Genetics, 118:461-470 (1988)) [FIG. 2A]. The genotypes of the GFP balancer chromosome lines are w⁺; In(2LR)noc^{4L}sco^{rv9R}, b¹/CyO, P{w^{+mC}=ActGFP}JMR1 for the 2 chromosome, w⁺; Sb ¹/TM3, P{w^{+mC}=ActGFP}JMR2, Ser¹ for the 3 chromosome and FM7i, P{w^{+mC}=ActGFP}JMR3/C(1)DX, f¹ for the X chromosome (see http://flybase.bio.indiana.edu/.bin/fbquery/). Flies were grown on standard corn meal/agar media at 25° C.

[0079] Recovery of insertions on the X chromosome: The mobilization-generating crosses were performed in vials as a precaution against recovering multiple lines from the same insertion event. This involved setting up >10,000 vials which made the collection of virgin females containing new mobilization events impractical. Eleven individual loci on the X chromosome (Tables 2, 3) were recovered by collecting y⁺;ry non-virgin females and crossing in J21A (FIG. 2B). Males carrying the P element and J21A (y⁺;ry⁺) were selected and outcrossed to y;ry virgin females. Incorporating this extra generation enabled selection of y⁺;ry⁺ virgin females in the next generation that had the new P insertion and J21A which could be transmission tested in the normal fashion. Insertions in the Y chromosome were not tested for transmission defects because the transmission tests were performed in females (FIG. 2B). However, about one-hundred and seventy lines were established that exhibit variegated expression of the yellow (y⁺) marker on the P element. These insertions represent a collection of insertions within heterochromatin, some of which are on the Y chromosome (K. W. Dobie, C. Yan and G. H. Karpen, unpublished data).

[0080] Monosome transmission assay: The monosome transmission assay is described by Cook et al., Genetics, 145:737-747 (1997)). A one-tailed students t-test demonstrated that lines exhibiting an average of <22% or >37% transmission are usually significantly different (p<0.05) from the normal 27% transmission for J21A (data not shown). If a line met the above transmission criteria using up to three vials per line, the transmission test was repeated with 10-15 vials to make the result more significant (FIG. 2B). A stock was made if a line still exhibited <22% or >37% transmission; 78 lines met this criteria.

[0081] Inverse PCR: Genomic DNA preparation, digests and ligations were performed using standard methods (Gloor et al., Genetics, 135:81-95 (1993); Spralding et al., Genetics, 153:135-177 (1999)). All lines were digested independently using three restriction enzymes (HpaII or HhaI or HaeIII) to give the greatest chance of generating 5′ and/or 3′ flanking DNA. Primers tgaaccactcggaaccatttgagcga (KWD2) (SEQ ID NO: 147) and cgatcgggaccaccttatgttatttcatcat (GK36) (SEQ ID NO: 148) were used to amplify off the 5′ end of SUPorP while primers ccagattggcgggcattcacataagt (KWD4) (SEQ ID NO: 149) and GK36 were used to amplify off the 3′ end. Amplified DNA bands were cut from agarose gels and reamplified before sequencing using ABI377 automated sequencers (Perkin Elmer).

[0082] Blast search strategy: Sequence data was analyzed using the Berkeley Drosophila Genome Project (BDGP) WU-BLAST 2.0 and National Center for Biotechnology Information (NCBI) Advanced BLAST servers. Initial searches were performed using a blastn search of the BDGP non-redundant (nr) DNA database. This provided a rich source of hits on large genomic clones (20-350 kb), known Drosophila genes, expressed sequence tags (ESTs) and P insertions from other screens (Enhancer-Promoter [EP: RØRTH 1996] or lethal P lines [Spralding et al., Genetics, 153:135-177 (1999)]). At least one large clone was obtained for every line that was generated from inverse PCR sequence data. This facilitated searches in BDGP using 5 kb of sequence surrounding the insertion site (2.5 kb either side) to identify neighboring genes, ESTs and other P elements. These 5 kb blocks and ESTs were also used to search for homologs in other species by performing a blastx search of the NCBI nr database. Hits on Drosophila ESTs demonstrate that the P insertion is close to or within an expressed sequence and homology with DNA flanking other lethal P insertions demonstrate that the insertion is close to or within a gene that is essential for viability. Protein accession numbers for similar human genes for Drosophila wap1, grp, Gli, cnn, pav, eIF-4E, Gap1 and JIL-1 were directly available from FlyBase reports (http://flybase.bio.indiana.edu/) while the Online Mendelian Inheritance in Man (OMIM) database (within the FlyBase reports) was used for Fim, Rab5, Hr39, His4, Sca, LanA. ESTs were identified for 80% of the novel loci. Blastx searches in NCBI using EST sequences from the novel loci were performed to identify predicted gene products (denoted by “GC” followed by a number). Similar human sequences for the novel loci were determined using the Genome Annotation Database of Drosophila (GadFly: http://flybase.bio.indiana.edu/).

[0083] Stage of lethality and cytological analysis of mitotic defects: Embryo collections were performed on apple juice plates supplemented with yeast paste to encourage egg laying. The stage of lethality was determined using standard procedures and by normalizing to inter se crosses using control non-lethal +/P, +/SM1 and +/TM3 lines. A line was classified as lethal if it exhibited <5% of the expected number of P/P flies and semilethal if it exhibited between 5% and 50% of the expected number of P/P flies (Ashburner, Drosophila: A Laboratory handbook, Cold Spring Harbor Laboratory Press, Cold Spring Harbor, N.Y.: 421 (1989)). Homozygous lethal and semilethal lines were crossed with GFP balancer chromosome lines which enabled discrimination of P/GFP and P/P larvae using a Zeiss Axiophot fluorescence microscope fitted with an FITC filter. Larval neuroblast squashes were prepared using a standard method (Ashburner, Drosophila: A Laboratory handbook, Cold Spring Harbor Lavoratory Press, Cold Spring Harbor, N.Y.: 8-9 (1989)) with some modifications. Neuroblasts were fixed in 45% acetic acid followed by 60% acetic acid for 45 sec each. Squashes were performed in 60% acetic acid and chromosomes were stained in 1 μg/ml DAPI. Citrate swelling was not used as it can result in artificial sister chromatid separation. Chromosome defects were examined at 63× magnification with 1.25× optivar on a Zeiss Axiophot fluorescence microscope and classified independently by two investigators.

### RESULTS

[0084] A screen was designed to search for new genes involved in chromosome inheritance by identifying mutations that affect inheritance of a sensitized minichromosome, such as J21A. A screen using inheritance of a sensitized minichromosome, such as J21A, as a dosage-sensitive substrate enabled the recovery of mutations that would otherwise be undetectable as heterozygotes and/or lethal as homozygotes (FIG. 1). P element mutagenesis was used for this screen due to the ease with which a “transposon-tagged” gene can be cloned using inverse PCR amplification of the flanking DNA. (Gloor et al., Genetics, 135:81-95 (1993); Spradling et al., Genetics, 153:135-177 (1999)). Use of P element mutagenesis greatly facilitated cloning and subsequent molecular-genetic analysis. However, other methods of mutagenesis may be readily used to mutagenize genes involved with chromosome inheritance. Examples of such methods include use of chemicals, ultraviolet light, transposable elements, viruses, as well as many other methods known in the art. Through use of the inventive method, seventy-eight sensitized chromosome inheritance modifier (Scim) lines were isolated that exhibited significantly altered levels of J21A inheritance. Analysis of DNA sequences flanking the P elements combined with the complete euchromatic sequence of Drosophila (Adams et al., Science, 287:2185-2195 (2000)) identified several known genes, many of which have chromosome inheritance-related functions. This result demonstrated that the method was able to identify genes related to chromosomal inheritance. The majority of lines represent mutations in novel Drosophila loci, many of which have human homologs, and most have been localized to a specific region of the Drosophila genomic sequence. This collection includes several novel genes involved in inheritance at several levels of control, such as centromere structure and function, chromosome movement (motor proteins), chromosome architecture (sister chromatid cohesion, condensation and replication) or cell-cycle regulation (checkpoint proteins or the APC).

[0085] Analyses demonstrated that inheritance of the J21A minichromosome derivative is sensitive to mutations in genes important for inheritance. Of the about three-thousand lines of Drosophila that were screened, seventy-eight lines exhibited significantly altered levels of chromosome inheritance. In those lines of Drosophila that displayed altered chromosome inheritance, the polynucleotide that was mutated was identified and characterized. Through use of the inventive method, seventy-eight lines were recovered that exhibit altered J21A inheritance; sixty-nine lines exhibit significantly decreased transmission and nine lines exhibit significantly increased transmission. The use of P elements as the mutagenic agent and inverse PCR enabled the generation and isolation of genomic DNA flanking 90% of the P element insertion sites. The completion of the euchromatic Drosophila genome sequence (Adams et al., Science, 287:2185-2195 (2000)) and analysis of the flanking sequences allowed the collection to be divided into two groups. First, P insertions within, or close to, eighteen known Drosophila genes were identified. Mutagenized genes were involved in overall chromosome architecture/organization (His4 and JIL-1), DNA replication (rfc4), sister chromatid cohesion (wap1), microtubule dynamics (Gap1 and Rab5), spindle organization (cnn and pav), and cell cycle regulation (nos and grp) (FIG. 6). Four of these genes (cnn, pav, wap1 and grp) have published abnormal metaphase phenotypes associated with null mutations. It is unlikely that so many loci with chromosome-related functions would be recovered by chance. This result demonstrates that the collection is enriched for genes that promote inheritance. Second, forty-six lines representing thirty-four individual loci at known locations in the genome representing mutations in novel loci were identified. Based on the precedent set by the known loci, it is thought that >50% of the insertions in novel loci (>17 genes) will also have direct roles in chromosome inheritance at several levels of control. Eighteen percent of the lines are lethal or semilethal when homozygous for the P element and exhibit dramatic and distinctive mitotic chromosome defects, demonstrating that these loci play vital and different roles in inheritance. Cytological studies demonstrate that J21A binds the outer kinetochore protein ZW10 (Williams et al., Nature Genetics 18:30-37 (1998)), MEI-S332, another protein that binds the centromere region (Lopez et al. in press) and CID, the functional orthologue of CENP-A, a centromere-specific histone H3-like protein (M. Blower and G. H. Karpen, unpublished results), demonstrating that J21A contains a functional kinetochore.

[0086] The small size of J21A per se likely predisposes sensitivity in a mutant background in several ways. First, J21A inheritance is particularly sensitive to reduced levels of kinesin-like proteins (KLPs) that function in spindle organization and cytokinesis. The Drosophila KLP family includes no distributive disjunction (nod), non-claret disjunction (ncd) and kinesin-like protein 3A (klp3A) (Adams et al., Genes Dev., 12:1483-1494 (1998)) and all three genes have very dramatic dominant effects on J21A inheritance (Murphy and Karpen, Cell, 81:139-148 (1995); Cook et al., Genetics, 145:737-747 (1997)). The small size of J21A and/or a limited amount of centric heterochromatin likely renders it susceptible to falling off a compromised spindle. Centrosomes are not present in female meiosis I, and such anastral spindle formation appears to initiate from the chromosomes rather than the poles (Hawley and Theurkauf, Trends Genet., 9:310-317 (1993); Karpen and Endow, Meiosis: Chromosome Behavior and Spindle Dynamics, in Frontiers in Biology, eds. Endow and Glover, Oxford University Press (1998)). Effects on the sensitized minichromosome in females were screened for, and the small size of J21A may make it particularly susceptible to heterozygosity for mutations in spindle components. Second, the lack of substantial amounts of centric heterochromatin likely compromises heterochromatin-specific functions such as cohesion (Lopez et al. in press) and pairing (Demburg et al., Cell, 86:135-146 (1996); Karpen et al., Science, 273:118-122 (1996)). Third, J21A inheritance may be sensitive to the dose of proteins involved in overall chromosome structure and DNA replication because the small size renders it susceptible to stochastic factors that influence chromosome architecture such as limited origins of replication. The unusual properties of J21A enabled the recovery of mutations with diverse functions including spindle dynamics and organization, overall chromosome architecture (e.g., chromatin structure, sister chromatid cohesion, DNA replication) and broader functions such as cell-cycle regulation (FIG. 6).

[0087] The Sensitized Screen Identifies Known Genes Involved in Chromosome Architecture

[0088] Mutations in wap1 result in an increase in X chromosome nondisjunction during female meiosis and partial separation of all sister chromatids at heterochromatic regions in mitotic chromosomes (Verni et al., Genetics, 154:1693-1710 (2000)). In addition, wap1 is a dominant suppressor of PEV, the heterochromatin-induced gene silencing of normally euchromatic genes (Wakimoto, Cell, 93:321-324 (1998)). These phenotypes imply a role for WAPL in achiasmate chromosome segregation during meiosis, which is heterochromatin-dependent (Karpen et al., Science, 273:118-122 (1996); Demburg et al., Cell, 86:135-146 (1996)), and pairing between the heterochromatic portions of all the sister chromatids during mitosis. It is thought that inheritance of J21A is more sensitive to a mutation in wap1 than the X, 2 and 3 chromosomes which have intact centromeres and large amounts of heterochromatin. The collection of mutations likely contains other genes with roles in heterochromatin biology. Thus, a useful secondary screen would be to test whether the disclosed P insertions enhance or suppress PEV which involves heterochromatic-dependent gene regulation. In addition, it will be useful to determine the cytological reasons for J21A loss in wap1 mutants, which may allow the determination of which heterochromatic functions are related to inheritance.

[0089] A P insertion associated with one of the histone H4 (His4) genes was recovered. There are five classes of major histone genes that are grouped as a unit (His2A, His2B, His1, His3, and His4) and, in Drosophila, the histone unit is repeated ˜100 fold to achieve sufficient expression for the enormous task of packaging the genome (Kedes, Annu. Rev. Biochem. 48:837-870 (1979)). The P insertion in His4^{Scim} appears to be close to a copy of His4 at the edge of the histone cluster (data not shown) which may represent a differentially expressed or alternative form of H4. Genetic (Smith et al., Mol. Cell Biol., 16:1017-1026 (1996)) and molecular (Meluh et al., Cell, 94:607-613 (1998)) analyses have demonstrated that histone H4 interacts with Cse4p, the Saccharomyces cerevisiae centromere-specific histone H3-like protein, and that this interaction is required for the formation of centromeric chromatin and faithful chromosome inheritance. Inheritance of J21A would be particularly sensitive to mutations in genes required for centromere formation because it is missing one-third of the functional centromere. Further analysis will utilize a minichromosome deletion series (Williams et al., Nature Genetics, 18:30-37 (1998); Murphy and Karpen, Cell, 81: 139-148 (1995a); Cook et al., Genetics, 145:737-747 (1997)) to determine whether this mutation interacts directly with the centromere.

[0090] JIL-1 is localized on chromosomes throughout the cell cycle in Drosophila, to the gene-rich interband regions of larval polytene chromosomes, and is present approximately twice as much on the hypertranscribed male X chromosome compared to autosomes (Jin et al., Mol. Cell 4:129-135 (1999)). The phosphorylation properties and characteristic localization pattern suggest that JIL-1 is a chromosomal kinase involved in regulating the chromatin structure of regions of the genome that are actively transcribed. A mutation in JIL-1 could affect J21A inheritance by either affecting the regulation of a gene or genes required for inheritance or by affecting overall chromatin structure and thereby interfering with inheritance. J21A inheritance may be particularly sensitive to affects on chromatin structure because it has a greatly reduced amount of heterochromatin.

[0091] Similarly, the null mutation in rfc4^{Scim} may compromise the assembly of the RFC complex and result in a block at S-phase. In heterozygotes, J21A maintenance may be more sensitive to the dose of replication factors because it is much smaller than the other chromosomes and 50% comprises heterochromatin, which replicates late in S phase. Incomplete replication of J21A would reduce J21A's ability to be transmitted intact during mitosis. Analysis of chromosome morphology in homozygous larvae from rfc4^{Scim} demonstrated dramatic and characteristic chromosome defects associated with this line that are consistent with aberrant replication. The recovery of rfc4 demonstrates the benefit of a sensitized screen to uncover essential loci that have little or no effect on endogenous chromosomes as heterozygous mutations, and this mutation will be an important tool in future analyses of replication in Drosophila. This mutation will also provide an important tool in homologous genes that are found in other organisms that include mammals, such as humans.

[0092] The Sensitized Screen Identifies Known Genes Involved in Spindle Organization/function

[0093] CNN is required for localization of the other centrosomal proteins such as tubulin, CP60 and CP190 for the assembly of functional centrosomes that are required for mitotic spindle organization. The cnn^{Scim} P insertion may reduce the levels of CNN to a phenocritical level, such that mitotic spindles are sufficient to organize full sized chromosomes but are compromised to a degree that results in loss of J21A. Megraw et al., Development, 126:2829-2839 (1999) describe that mitotic spindle defects in cnn mutants occur in a cumulative fashion and that some mitotic spindles look completely normal. Furthermore, CP190 and tubulin are present at low levels at these centrosomes. This indicates that functional centrosomes can still form even in a cnn mutant background. Ultimately the embryos die at around cycle 12 before cellularization can occur. cnn^{Scim} is not lethal when homozygous for the P element implying that it could be a hypomorphic mutation. The description that the effects of a cnn mutant background are cumulative (Megraw et al., Development, 126:2829-2839 (1999)), in conjunction with a heterozygous hypomorphic P insertion, may explain why J21A is lost in the P insertion background while the other chromosomes are not.

[0094] PAV is a member of the kinesin-like protein (KLP) superfamily of microtubule motor proteins that are required for centrosome organization, spindle assembly and chromosome movement (Moore and Endow, Bioessays, 18:207-219 (1996)). Inheritance of J21A appears to be particularly sensitive to reduced levels of the KLPs nod, ncd and klp3A (Murphy and Karpen, Cell, 81:139-148 (1995a); Cook et al., Genetics, 145:737-747 (1997)). J21A inheritance may be compromised in these mutant backgrounds because J21A does not contain all the cis-acting sequences required for normal inheritance. For example, a partially-defective spindle may enhance loss of a partially-defective centromere because it binds fewer microtubules, in comparison to a normal centromere. Another possibility is that J21A inheritance may be particularly compromised due to the greatly reduced size and an incapacity to bind chromokinesins that interact all along chromosome arms, and are thought to mediate antipoleward forces (Murphy and Karpen, Cell, 81:139-148 (1995a); Afshar et al., Cell, 81:129-138 (1995)).

[0095] The Sensitized Screen Identified known Genes involved in Neural Development or with Actin-Related functions.

[0096] At least four P insertions (two in oaf, and two in sca ) in genes with potential roles in neural development in Drosophila (Bergstrom et al., Genetics, 139:1331-1346 (1995); Lee et al., Genetics, 150:663-673 (1998)) were recovered. There is a strong precedent for problems in neural development being a secondary consequence of defects in early chromosome inheritance. Several mutations have been described in Drosophila which affect PNS development (Kania et al., Genetics, 139:1663-1678 (1995); Salzberg et al., Genetics, 147:1723-1741 (1997)) that result from defects in processes essential for chromosome inheritance including chromatid decatenation (barr: Bhat et al., Cell, 87:1103-1114 (1996)), spindle formation (pav: Adams et al., Genes Dev. 12:1483-1494 (1998)) and cytokinesis (pav: Adams et al., Genes Dev., 12:1483-1494 (1998); pb1: Propopenko et al., Genes Dev., 13:2301-2314 (1999)). Thus, while some of the insertions are in genes that have documented roles in PNS development, they may have primary roles in inheritance. Analysis of mitotic chromosomes from lines with null mutations (imprecise excisions) is necessary to test this hypothesis.

[0097] Mutations in two genes (bif and fim) that function in the actin cytoskeleton were also recovered. BIF colocalizes with actin as early as cycle 10 in preblastoderm embryos in defined cytoplasmic domains (Bahri et al., Mol. Cell Biol., 17:5521-5529 (1997)). The colocalization of BIF with actin at early stages of embryogenesis may be significant for chromosome inheritance (see below). Yeast fimbrin (SAC6) is lethal when overexpressed and cells exhibit an abnormal distribution of actin with defects in cytoskeletal organization (Adams et al., Nature, 354:404-408 (1991)). Drosophila embryos undergo 13 rapid cell divisions (syncytial divisions) without cellularization. The organization of the actin cytoskeleton is essential for correct distribution of syncytial nuclei during this period (Foe et al., The development of Drosophila Melanogaster, Eds. Bate and Martinez-Arias, Cold Spring Harbor Laboratory Press, Cold Spring Harbor, N.Y. (1993)). Mutations in proteins that interact with actin may affect the architecture of the actin cytoskeleton during early embryogenesis and have an impact on chromosome inheritance.

[0098] The Sensitized P Element Screen to Identify Dominant Mutations that Affect Chromosome Inheritance

[0099] The J21A minichromosome is transmitted to only 27% of the progeny in a monosome transmission assay. It was predicted that some heterozygous mutations in genes important for chromosome inheritance would affect J21A transmission, but would not affect inheritance of the sex chromosomes or autosomes (FIG. 1). Indeed, previous studies have shown that J21A transmission is more sensitive than the sex chromosomes or autosomes to heterozygous mutations in genes known to be important for mitosis and meiosis (Murphy and Karpen, Cell, 82:599-609 (1995); Cook et al., Genetics, 145:737-747 (1997)). The SUPor-P element was used to generate the mutations because the presence of two Suppressor of Hairy Wing [Su(Hw)] binding sites enhance its mutagenic properties (Roseman et al., Genetics, 141:1061-1074 (1995)).

[0100] SUPor-P was mobilized off the CyO 2 chromosome and about three-thousand five-hundred mobilizations were recovered with the P element inserted in a different chromosome. This strategy enabled the targeting of the entire Drosophila genome (X, Y, 2, 3 and 4 chromosomes) with P element insertions (FIG. 2A). Approximately five-hundred lines were not tested due to insertions in the Y chromosome (transmission tests were performed in females) or flies dying in the food. Each of the three-thousand remaining lines were tested for dominant effects (increases or decreases) on J21A transmission (FIG. 2B). Statistical analyses indicated that lines exhibiting J21A transmission to <22% or >37% of progeny are potentially interesting and warrant further analyses (see Materials and Methods). Seventy-eight lines were recovered with altered J21A transmission, which were named “Scim”, for Sensitized chromosome inheritance modifiers (Table 1). Sixty-nine lines exhibited significantly reduced transmission of J21A, ranging from 9% to 21%. In addition, nine lines were recovered that significantly increased J21A transmission. These ranged from 38% to as high as 51% (completely normal) transmission. The lines that exhibited increased transmission could represent an interesting class of mutations in cell-cycle regulatory genes or genes involved in the repression of proteins involved in inheritance (see Discussion). Fourteen lines were lethal or semilethal when homozygous for the P element. Thus, 18% (14 out of 78) of the collection affect genes that are important for viability and strongly influence minichromosome inheritance.

[0101] P Insertions in Known Genes Involved in Chromosome Inheritance

[0102] P element mutagenesis was utilized to facilitate molecular analysis of the mutated loci. Inverse PCR was used to generate P element flanking DNA sequence and we capitalized on the recent maturation of Drosophila genome sequencing projects (Adams et al., Science, 287:2185-2195 (2000)) to position 90% (70 out of 78) of the lines in the genome. This approach enabled division of the collection into P insertions associated with known (Table 2) or novel (Table 3) loci.

[0103] Twenty-two P insertions were recovered within or close to the open reading frame (ORF) of 18 known Drosophila genes (Table 2; FIG. 3A). 78% (14 out of 18) of the known Drosophila loci have homologous sequences in humans. The recovery of a gene in the screen suggests that the normal product is dose limiting (the mutations are dominant) and that it may be important for chromosome inheritance. The P insertion was positioned relative to the ORF for all the known loci and demonstrated that the majority of the P insertions have inserted within or close to the 5′ untranslated region (UTR) [FIG. 3A]. The preference for P elements to insert close to the start of transcription of genes has been documented previously (Spradling et al., Proc. Natl. Acad. Sci. USA, 92:10824-10830 (1995); Liao et al., Proc. Natl. Acad. Sci. USA, 97:3347-3351 (2000) and is confirmed by this study. In some cases the P element could have hopped in and out of a locus in another region of the genome that has the bona fide effect on J21A transmission; however, it is likely that the deviant J21A transmission phenotype is associated with P element-induced mutations in most or all of these loci. Precise excision analysis may be performed to test for reversion of the transmission and viability defects with any lines.

[0104] P insertions were identified that are associated with four genes that are known to play a role in chromosome architecture and function: wings-apart like (wap1), histone H4 (His4), JIL-1 and replication factor complex-4 (rfc4) [Table 2]. The P insertion in wap1^{Scim} is within the second intron in wap1 (FIG. 3A). Mutations in wap1 result in partial separation of all sister chromatids in heterochromatic regions of mitotic chromosomes (Verni et al., Genetics, 154:1693-1710 (2000)). The P insertion in His4^{Scim} is ˜50 bp 5′ of the start of transcription of His4 within the histone gene cluster (FIG. 3A) that encodes a fundamental structural subunit of chromatin (Kedes, Annu. Rev. Biochem., 48:837-870 (1979)). JIL-1^{Scim} is a P insertion within the 5′ UTR of JIL-1 (FIG. 3A). JIL-1 can phosphorylate histone H3 in vitro and has been described as a chromosomal kinase involved in regulating the chromatin structure of actively transcribed regions of the genome (Jin et al., Mol. Cell 4:129-135 (1999)). rfc4^{Scim} is a homozygous lethal P insertion within the first exon of rfc4 (FIG. 3A and see below). It is thought that P insertions disrupting wap1, His4, JIL-1 and rfc4 affect chromosome inheritance because the gene products have general roles in maintaining chromosome architecture, which may impact processes such as condensation, cohesion, centromere function or transcription.

[0105] Three P insertions were recovered in two loci involved in GTP metabolism. Two independent P insertions are associated with GTPase-activating protein (Gap1); Gap1^{Scim-a} is homozygous viable while Gap1^{Scim-b} is semilethal when homozygous (Table 2). Gap1^{Scim-a} is ˜480 bp 5′ of the start of transcription while Gap1^{Scim-b} is within the first intron (FIG. 3A). While Gap1 has been shown to be involved in Sevenless signaling (Gaul et al., Cell, 68:1007-1019 (1992)), this function is linked to the hydrolysis of GTP, a process that is also essential for the binding of kinetochores to microtubules and chromosome movement during prometaphase (Severin et al., Nature, 388:888-891 (1997)). Rab5^{Scim} is homozygous lethal and the P insertion is within the 5′ UTR of the small GTPase Rab-protein 5 (Rab5) [Table 2; FIG. 3A]. The activated GTP-bound form of Rab5 has a role in the motility of endosomes along microtubules both in vivo and in vitro by interacting with an as yet unidentified kinesin-like motor (Nielsen et al., Nature Cell Biol., 1:376-382 (1999)). The Gap1^{Scim-a}, Gap1^{Scim-b} and Rab5^{Scim} mutations may affect chromosome inheritance due to perturbation of microtubule dynamics (see below).

[0106] Insertions were also recovered in two loci, centrosomin (cnn) and pavarotti (pav), that are required for spindle organization (Table 2). The P insertion in cnn^{Scim} is within the first intron of cnn (FIG. 3A). CNN is required for the assembly of functional centrosomes that are in turn required for mitotic spindle organization during early embyogenesis (Megraw et al., Development, 126:2829-2839 (1999)). Mutations in cnn result in dramatic defects in embryonic nuclear division; mitotic spindles are often clumped together and unevenly distributed in the embryo cortex. The P insertion in pav^{Scim} is ˜120 bp 5′ of the start of pav transcription (FIG. 3A). PAV is involved in the organization of the central spindle at telophase and this organization appears to influence the localization of architectural proteins (e.g., Peanut, Actin and Anillin) required for cytokinesis and at least one regulatory protein (Polo kinase) that may have a role in signaling between the centromere, the spindle midzone and the centrosomes (Adams et al., Genes Dev., 12:1483-1494 (1998); Logarinho et al., J. Cell Sci., 111:2897-2909 (1998)). The recovery of genes involved in spindle dynamics and organization is significant because it demonstrates an enrichment for loci with direct roles in chromosome inheritance.

[0107] Two independent P insertions are associated with cell cycle regulatory genes. Analysis of genomic sequence flanking nos^{Scim} demonstrated that the 5′ and 3′ parts of the P element appear separated by 9 kb of genomic DNA and that the 5′ region of the P element is ˜260 bp 5′ of the start of transcription for nanos (nos) [Table 2; FIG. 3A]. No evidence was found for an ORF around the 3′ region of the P element. One explanation for this unusual arrangement is that the P element underwent an imprecise excision that separated the 5′ and 3′ ends. While nos has classically been demonstrated to be involved in establishing polarity in the Drosophila embryo (Wang and Lehmann, Cell, 66:637-647 (1991)), it is also involved in the downregulation of mitosis and transcription in the Drosophila germline (Deshpande et al., Cell, 99:271-281 (1999)). Failure to attenuate the cell cycle during early syncytial divisions may promote the loss of the sensitized minichromosome. Second, a line with two P insertions was identified, one within the first intron of grapes (grp) [Table 2; FIG. 3A] and the other within a multiple insertion locus at 23A1-B2 (Scim12⁴, Table 3, FIG. 3b and see below). grp is homologous to chk1/rad27, a DNA checkpoint gene in Schizosaccharomyces pombe. Flies mutant for grp exhibit abnormal metaphases and the protein appears to be involved in DNA replication/damage checkpoint regulation (Fogarty et al., Curr. Biol., 7:418-426 (1997)) via a role in centrosome formation (Sibon et al., Nature Cell Biol., 2:90-95 (2000)). Separation of the two insertions by recombination will allow for the determination of whether one or both of these loci is responsible for the transmission defect.

[0108] Two homozygous lethal P insertions were recovered within the first intron of eukaryotic initiation factor 4E (eIF-4E) [Table 2; FIG. 3A]. EIF-4E is required for translation initiation (Hernandez et al., Mol. Gen. Genet., 253:624-633 (1997)) and it is likely that reduced levels of EIF-4E could affect levels of a protein or proteins that are directly involved in inheritance. Mutations in genes were also recovered that likely represent a class of functions that play indirect roles in inheritance including Fimbrin (Fim), bifocal (bif), out at first (oaf) and scabrous (sca) [Table 2; FIG. 3A]. The functions of these loci and how they might impact minichromosome inheritance is discussed herein.

[0109] Scim31 is a P insertion within the first intron of Domina (Dom) [Table 3; FIG. 3A]. Dom has been described as a suppressor of position effect variegation (PEV) (M. Strödicke, S. Karberg and G. Korge, unpublished data), implying that it may have a role in chromatin structure and could therefore impact chromosome inheritance. However the P insertion is relatively far from the start of transcription for Dom (˜6 kb 3′, FIG. 3A) when compared with the other insertions and ORFs described here, and sequence analysis has identified novel ESTs that span the insertion site. Therefore the inheritance defect may be due to a disruption in Dom and/or the novel locus represented by the ESTs.

[0110] A small subset of insertions were recovered in genes with no obvious role in inheritance including Gliotactin (Gli), Hormone receptor-like in 39 (Hr39) and laminin A (LanA) [Table 2; FIG. 3A]. This latter group could uncover previously unknown functions for these proteins. Finally, three P insertions are associated with mobile genetic elements (mdg3, gypsy, YOYO) and therefore have not been positioned precisely within the genome (Table 2). For example, it has been estimated that the mdg3 element is present at 15-17 sites on different chromosomes (Ilyin et al., Chromosoma, 81:27-53 (1980)). Presumably the transmission defects in Scim's 1, 2 and 3 and the lethal phenotype in Scim1 are due to disruptions in neighboring loci.

[0111] In sum, of the eighteen known genes, ten genes (cnn, pav, wap1, His4, JIL-1, rfc4, Gap1, Rab5, nos, grp) have direct roles in chromosome inheritance (56%) and a further five genes (Fim, bif, oaf, sca, eIF-4E) may have an indirect role (28%).

[0112] Homozygous Lethal P Insertions in Known Loci Exhibit Mitotic Chromosome Defects

[0113] Insertions were recovered in four genes with previously documented abnormal mitotic phenotypes associated with null mutations (wap1: Verni et al., Genetics, 154:1693-1710 (2000), cnn: Megraw et al., Development, 126:2829-2839 (1999), pav: Adams et al., Genes Dev., 12:1483-1494 (1998), grp: Fogarty et al., Curr. Biol. 7:418-426 (1997); Sibon et al., Nature Cell Biol., 2:90-95 (2000)). The insertions associated with cnn, wap1 and grp are not lethal when homozygous for the P insertion and likely represent hypomorphic alleles (Table 2). The analysis of mitotic phenotypes was extended to the lethal insertions in known loci. Analysis of mitotic chromosomes prepared from larval neuroblasts demonstrated a range of dramatic defects associated with all four homozygous larval lethal lines (FIG. 4). The mitotic chromosome phenotypes described below have not been described previously for these known loci.

[0114] Harrison et al., Genetics, 139:1701-1709 (1995) describe the cloning of rfc4 (rfc40) in Drosophila and demonstrate that the gene encodes a 40-kDa protein suggesting that rfc4 is the gene for one of the small subunits of the Drosophila RFC complex. The RFC complex is required for loading proliferating cell nuclear antigen (PCNA) onto DNA which in turn tethers the polymerase to the DNA template during synthesis (Mossi et al., J. Biol. Chem., 272:1769-1776 (1997)). Analysis of mitotic chromosomes prepared from rfc4^{Scim} neuroblasts demonstrated fragmented metaphase and anaphase figures (FIG. 4D, E). While individual chromosomes can easily be identified in control metaphase figures (FIG. 4A), the individual chromosomes in rfc4^{Scim} are difficult to identify and some regions of the chromosome arms exhibit what appears to be aberrant condensation (FIG. 4D, E arrows). The lethal insertion in Gap1^{Scim-b} results in precocious sister chromatid separation and aberrant anaphase figures (FIG. 4F, G). Given that Gap1 is involved in spindle formation (see above), it is thought that precocious sister chromatid separation in homozygous mutants may be due to an inability of the chromosomes to segregate to the poles correctly at anaphase. The phenotypes associated with rfc4^{Scim} and Gap1^{Scim-b} are satisfying because they represent what one might predict from mutations in these genes. This suggests that it is possible to make predictions about gene function from the chromosome phenotypes associated with some of the novel loci (see below).

[0115] It was very difficult to find any mitotic figures in neuroblast squashes prepared from the eIF-4E and Rab5 lines indicating that the mitotic index is extremely low. The most obvious phenotype associated with the insertions in eIF-4E was fragmented interphase nuclei that were 2-4 times the size of wild type nuclei (FIG. 41). Again, in the rare mitotic figures, the individual chromosome morphology is disrupted and the chromosomes appear decondensed (FIG. 4H). No mitotic figures were found in six slides prepared from the insertion in Rab5. Colcemid treatment enabled the identification of a few mitotic figures, all of which were grossly disrupted, exhibiting chromosome fragmentation (FIG. 4J, arrow). The extreme phenotypes associated with eIF-4E and Rab5 are thought to reflect the general functions of these loci; the affects on chromosome architecture could be due to an indirect role in chromosome inheritance or due to a general affect on cellular health.

[0116] Homozygous P-induced mutations in the collection are concluded to result in characteristic defects in autosome and sex chromosome inheritance, and the effect of the mutations is not limited to minichromosome inheritance. Further, novel mitotic chromosome defects are characterized that are associated with homozygous lethal P-induced mutations in known loci.

[0117] The Majority of the Collection Comprises P Insertions in Novel Loci

[0118] The insertion sites for a further forty-six lines representing thirty-four independent loci have also been identified (Table 3). No known Drosophila genes have been identified that are associated with these lines. This result has been determined after extensive analysis of the P insertion sites. Based on the precedent set by the insertions in known loci, a significant number (>50%) of these lines likely represent mutations in novel genes with roles in chromosome inheritance.

[0119] Eight independent insertions at 23A1-B2 were recovered which surprisingly includes four low and four high transmitting lines (Scim12¹-Scim12⁸; Table 3). Analysis of inverse PCR sequence enabled the identification of a large genomic clone (AC019974) and two ESTs which positioned the P insertions relative to a putative ORF (FIG. 3B). The eight insertions are grouped as two clusters with ˜2.5 kb separating them; three insertions are ˜100 bp 5′ of the CAAT and TATA boxes while five lines are between the predicted first and second exons. A conceptual translation of the locus does not contain any signature motifs and database searches suggest that the locus is novel. An epitope-tagged cDNA expressed in S2 embryonic tissue culture cells localizes to the nucleus but is not found on metaphase chromosomes (K. W. Dobie, C. D. Kennedy and G. H. Karpen, unpublished data).

[0120] Four independent loci were recovered with two P insertions associated with them (Table 3). Scim8¹ and Scim8² have inserted in the same orientation on the X chromosome and a novel EST is associated with the insertion site. Scim13¹ and Scim13² have inserted in opposite orientations at the same site and are associated with novel ESTs. Surprisingly, they exhibit very different primary J21A transmission rates (19% vs. 39% respectively; Table 3) which may be due to the opposite orientation of the insertions. Scim14¹ and Scim14² have insertions in opposite orientations at the same site; this region is rich with P elements from other screens including a lethal P element line. Given that hypomorphic insertions were recovered in known loci, the homozygous viable P insertions in Scim14¹ and Scim14² may be associated with a locus important for both chromosome inheritance and viability. Scim15¹ and Scim15² are intriguing because they exhibit the lowest (9%) and third lowest (14%) J21A transmission rates recovered from the screen (Table 3). The P insertions are in the same orientation at the same site in 30D 1-2 and are associated with novel ESTs. No known genes or homologs surrounding the P insertion site in the four loci described above were detected. This supports the thought that the above P insertions may represent mutations in four novel loci that affect chromosome inheritance.

[0121] The remaining twenty-eight lines are single P insertions that have been localized to a specific region of the genome sequence and likely represent mutations in novel loci (Table 3). ESTs were identified that are associated with 80% (37 out of 46) of the novel lines and 40% (15 out of 37) of these have homologous human sequences (Table 3). Further analysis will be facilitated by the genomic clones, ESTs and other P insertions surrounding these loci. Eight lines were not localized to a specific region of the genome because sequence data from the flanking regions was not generated, potentially due to deletions or rearrangements in the P element sequence, or the absence of relevant restriction sites in the flanking DNA.

[0122] Homozygous Lethal P Insertions in Novel Loci Exhibit Mitotic Chromosome Defects

[0123] The analysis of mitotic chromosomes in larval neuroblasts was extended to those novel loci that are homozygous lethal. Again, characteristic mitotic defects associated with all of these loci were observed.

[0124] Two novel loci exhibit similar but distinctive degrees of precocious sister chromatid separation. Scim25 has a P insertion associated with a novel locus at 51A1-2 (Table 3). This line exhibits a very low mitotic index and partial loss of sister chromatid cohesion in some mitotic figures (FIG. 5A). The chromosomes appear to lose a degree of cohesion at heterochromatic regions, but the sister chromatids do not completely separate; instead they remain attached by some chromatin (FIG. 5A, arrowsheads). The 4 chromosomes appear as “dumbbells” due to the partial loss of cohesion and the sister chromatids of the Y chromosome are partially separated (FIG. 5A, arrows). This phenotype is very similar to that described for wap1 (Verni et al., Genetics, 154:1693-1710 (2000)), suggesting that the locus disrupted in Scim25 may have a function in maintaining heterochromatin architecture and sister chromatid cohesion/separation. Further, interphase nuclei appear disintegrated and some mitotic figures are clumped together (FIG. 5B). These may represent downstream phenotypes that are induced by precocious loss of cohesion. The P insertion in Scim9 is associated with a novel locus at 10C1-2 (Table 3). Although the mitotic index appears normal, some metaphase figures exhibit partial sister chromatid separation. In FIG. 5C the sister chromatids in one of the 2 chromosomes and the Y chromosome are partially separated (arrows) and one of the 4 chromosomes appears larger than the other, as though the sister chromatids are starting to separate (FIG. 5C, arrowhead). Partial loss of cohesion represents an intermediate phenotype, and many of the metaphase figures exhibit complete sister chromatid separation (FIG. 5D). This phenotype is similar to that observed for Gap1^{Scim-b} (see above) which could suggest a role for Scim9 in microtubule dynamics. A second possibility is that a mutation in a locus required to hold sister chromatids together might also result in a similar phenotype.

[0125] Scim31 has a homozygous lethal P insertion within the first intron of Dom (Table 3; FIG. 3). The insertion within this locus results in a unique phenotype; although the mitotic index appears normal, a large number of the mitotic figures exhibit polyploidy (FIG. 5E). Some anaphase figures exhibit missegregation of chromatids, which likely represent early stages in the progression to polyploidy (FIG. 5F, arrow). In this example, only seven sister chromatids, rather than the expected eight chromatids, are present at the lower right pole. A high degree of aneuploidy is also observed, which would be expected to accompany this type of segregation defect (data not shown). Interestingly, Scim31 is one of the high transmitting lines and, as mentioned earlier, novel ESTs associated with the P insertion within the Dom ORF have been identified.

[0126] The homozygous lethal P insertion in Scim24 results in a lower than normal mitotic index and some mitotic figures exhibit aneuploidy and/or decondensed chromosomes (FIG. 5G, H). Further, many of the nuclei appear disintegrated, similar to that depicted in Scim25. The P insertion in Scim1 is associated with a mdg3 retrotransposon and the insertion is homozygous lethal (Table 2). Mitotic chromosomes exhibit several defects including disintegrated chromosome arms, decondensed centric heterochromatin and sister chromatid separation (FIG. 51). Further, a high proportion of mitotic figures are so hypocondensed that it is difficult to distinguish individual chromosomes (FIG. 5J). Finally, Scim12⁵ and Scim12⁶ are lethal insertions within the multiple insertion locus at 23A1-B2 (Table 3). Again, colcemid treatment was required to find any mitotic figures, all of which exhibit aberrant metaphases and sister chromatid separation (FIG. 5K).

[0127] The Sensitized Screen Recovered Mutations in Genes with Diverse Biological Roles

[0128] It was not immediately clear why mutations in gli, Hr39 and lamA were recovered in a screen for chromosome inheritance mutations. Briefly, gliotactin is a transmembrane protein involved in the establishment of the blood/nerve barrier (Auld et al., Cell, 81:757-767 (1995)); Hr39 (also know as DHR39 or FTZ-F1beta) is a member of the Drosophila nuclear hormone receptor family (Horner et al., Dev. Biol., 168:490-502 (1995)); Laminin A is localized to the basement membrane and has been shown to be involved in growth cone guidance of axons (Garcia-Alonso et al., Development, 122: 2611-2621 (1996)). It is possible that some mutations reflect the random noise that accompanies most screens; for example these insertions may have resulted from “hit-and-run” events, which result in mutations at loci unlinked to the final resting site of the P element. Alternatively, these loci may have as yet undescribed functions in inheritance.

[0129] Most of the isolated lines (88%) exhibit significantly reduced levels of transmission. This would be expected because P element mutagenesis should result in reduced levels of gene expression. In most cases this will perturb a particular function that is involved in inheritance and result in reduced J21A transmission. Some genes may dominantly increase transmission, however, for example, mutations in genes that encode repressor functions may result in misexpression of a protein required for proper spindle attachment to the kinetochore. Mutations of this sort may rescue J21A transmission by allowing more spindles to attach to the compromised centromere. Mutations in cell cycle regulatory proteins may also result in high transmission. Mutations in a regulator of the metaphase to anaphase checkpoint might result in a delay of the cell cycle and enable time for more faithful inheritance of J21A. Therefore this small subset of the collection (six individual loci) represent a very interesting class of genes and warrant further analysis.

[0130] The Majority of the Collection Represents P Insertions in Novel Loci

[0131] The identification of P insertions in known genes demonstrates some of the cellular functions that can be expected to be represented in the rest of the collection. It is estimated that >50% of the thirty-four novel loci will have roles in some of the functions already discussed (FIG. 6) as well as other essential inheritance functions such as kinetochore structure and microtubule capture and chromosome congression. Indeed, it has been demonstrated that all of the six independent homozygous lethal or semilethal mutations in novel loci exhibit dramatic mitotic chromosome defects. The identification of genomic clones, ESTs and other P insertions for many of these loci will greatly facilitate further analysis. Broad genetic screens performed in Drosophila have had an enormous impact on the field that they were designed to investigate, and also on other fields and in other organisms (Sandler et al., Genetics, 60:525-558 (1968); Baker and Carpenter, Genetics, 71 :255-286 (1972); Nüsslein-Volhard et al., Roux's Arch. Dev. Biol., 193:267-282 (1984); Kania et al., Genetics, 139:1663-1678 (1995); Salzberg et al., Genetics, 147:1723-1741 (1997); Sekelsky et al., Genetics, 152:529-542 (1999)). The tools are now in place to capitalize on this collection. The screening method of the invention enables the analysis of novel gene products that are required in multicellular eukaryotes for spindle formation, cell-cycle regulation, chromosome structure and centromere structure and function. At least two of the genes identified in the screen may have relevance to a human genetic disorder (wap1^{Scim} and Scim25). Patients with Roberts syndrome (RS) exhibit growth retardation, craniofacial malformations and tetraphocomelia (Van den berg and Francke, Am. J. Med. Genet., 47:1104-1123 (1993)). Mitotic cells from affected individuals exhibit chromosomes with a “railroad-track appearance” that look very similar to the wap1 mutant phenotype in Drosophila (Verni et al., Genetics, 154:1693-1710 (2000)). In sum, discoveries from this screen will impact on the understanding of how chromosomes and the cellular machinery are orchestrated to promote chromosome inheritance in muticellular eukaryotes and should inform us of the causes and consequences of human disorders associated with aneuploidy, such as birth defects and cancer.

TABLE 1
Dominant modifiers ofJ21A inheritance

| | # of | transmission | # homozygous |
|---|---|---|---|
| | lines | (%) | lethal* |
| Decreased | 69 | 9-21 | 11 (16%) |
| transmission | | | |
| Increased | 9 | 38-51 | 3 (33%) |
| transmission | | | |
| TOTAL | 78 | | 14 (18%) |

[0132] TABLE 2
Dominant modifiers of J21A inheritance in known loci

| | | | | |
|---|---|---|---|---|
| | T.T. | | | |
| Line | (%) | Location | Stage of Lethality | Human Accession # |

Insertions at known loci

| | | | | |
|---|---|---|---|---|
| Fim^{Scim} | 19 | 16A1-2 | — | P13797 |
| bif^{Scim} | 16 | 10D1-2 | — | — |
| wapl^{Scim} | 19 | 2D6 | — | BAA13391 |
| *grp^{Scim} | 17 | 36A6-7 | — | NP_001265 |
| Rab5^{Scim} | 21 | 22E1-2 | 1^{st} instar | NP_004153 |
| oaf^{Scim-a} | 20 | 22F3 | — | — |
| oaf^{Scim-b} | 20 | 22F3 | — | — |
| Gli^{Scim} | 19 | 35D4 | — | NP_000046 |
| Hr39^{Scim} | 18 | 39C1-3 | — | NP_004950 |
| His4^{Scim} | 20 | 39D | — | HSHU4 |
| Sca^{Scim-a} | 17 | 49D1-3 | — | NP_000499 |
| Sca^{Scim-b} | 20 | 49D1-3 | — | NP_000499 |
| cnn^{Scim} | 17 | 50A3-6 | — | AAC31665 |
| pav^{Scim} | 18 | 64B2-7 | embryonic | NP_004847 |
| rfc4^{Scim} | 21 | 64A10 | 2^{nd} instar/pupal | — |
| LanA^{Scim} | 14 | 65A10-11 | — | P25391 |
| eIF- | 13 | 67B1-2 | 3^{rd} instar | NP_001959 |
| 4E^{Scim-a} | | | | |
| eIF- | 17 | 67B1-2 | 3^{rd} instar | NP_001959 |
| 4E^{Scim-b} | | | | |
| Gap1^{Scim-a} | 18 | 67D2-3 | — | CAA61580 |
| Gap1^{Scim-b} | 10 | 67D2-3 | embryonic/1^{st} | CAA61580 |
| | | | instar** | |
| JIL-1^{Scim} | 19 | 68A4-5 | — | AAC31171 |
| nos^{Scim} | 17 | 91F4-5 | embryonic** | — |

Insertions at mobile elements

| | | | |
|---|---|---|---|
| Scim1 | 10 | 2 | 3^{rd}instar** |
| (mdg3) | | | |
| Scim2 | 20 | 2 | — |
| (gypsy) | | | |
| Scim3 | 20 | 2 | — |
| (YOYO) | | | |

T.T.= transmission test data.
*There are two P insertions in this line; one within grp (FIG. 3A) and one within a novel locus at 23A3-4 (Scim12⁴ , Table 3, FIG. 3B).
**semilethal. See Methods and Materials for derivation of Human Accession #.

[0133] TABLE 3
Dominant modifiers of J21A inheritance in novel loci

| Line | T.T. (%) | Location | Stage of Lethality | Clone accession # | Human accession # |
|---|---|---|---|---|---|
| Scim4 | 20 | X | — | AC012823 | a |
| Scim5 | 21 | X | — | AC019800 | a |
| Scim6 | 20 | 8C4-5 | — | AC014159 | b |
| Scim7 | 18 | 9B7-8 | — | AC013173 | a |
| Scim8¹ | 19 | 11B16-17 | — | AC019992 | b |
| Scim8² | 20 | 11B16-17 | — | AC019992 | b |
| Scim9 | 17 | 10C1-2 | 3^{rd} instar^{**} | AC017852 | a |
| Scim10 | 21 | 6D1-2 | — | AC013845 | BAA34480 |
| Scim11 | 25 | 19F2-3 | — | AC019797 | a |
| Scim12¹ | 51 | 23A3-4 | — | AC019974 | b |
| Scim12² | 21 | 23A3-4 | — | AC019974 | b |
| Scim12³ | 18 | 23A3-4 | — | AC019974 | b |
| Scim12⁴ | 17 | 23A3-4 | — | AC019974 | b |
| Scim12⁵ | 40 | 23A3-4 | embryonic/larval | AC019974 | b |
| Scim12⁶ | 40 | 23A3-4 | embryonic/larval | AC019974 | b |
| Scim12⁷ | 39 | 23A3-4 | — | AC019974 | b |
| Scim12⁸ | 19 | 23A3-4 | — | AC019974 | b |
| Scim13¹ | 19 | 23B1-2 | — | AC019901 | b |
| Scim13² | 39 | 23B1-2 | — | AC019901 | b |
| Scim14¹ | 19 | 28B1-2 | — | AC020004 | a |
| Scim14² | 21 | 28B1-2 | — | AC020004 | a |
| Scim15¹ | 9 | 30D1-2 | — | AC020324 | b |
| Scim15² | 14 | 30D1-2 | — | AC020324 | b |
| Scim16 | 21 | 31F1-2 | — | AC020157 | AAB07777 |
| Scim17 | 16 | 33B3-4 | — | AC019795 | b |
| Scim18 | 18 | 38C5-6 | — | AC017171 | b |
| Scim19 | 17 | 39A3-B1 | — | AC018212 | NP_003866 |
| Scim20 | 21 | 42A8-B3 | — | AC015089 | NP_002653 |
| Scim21 | 20 | 42B1-3 | — | AC013962 | b |
| Scim22 | 38 | 42C8-9 | — | AC014497 | AAC79152 |
| Scim23 | 19 | 44B | — | AC020344 | Q92539 |
| Scim24 | 19 | 47C3-4 | 3^{rd} instar | AC017793 | NP_005350 |
| Scim25 | 15 | 51A1-2 | 2^{nd} instar | AC015180 | NP_005307 |
| Scim26 | 14 | 50E6-51A2 | — | AC012771 | AAC32592 |
| Scim27 | 21 | 54B4-5 | — | AC020084 | AAC63061 |
| Scim28 | 43 | 57B2-3 | — | AC020202 | a |
| Scim29 | 14 | 58E4-F4 | — | AC020206 | b |
| Scim30 | 19 | 84D9-E2 | — | AC013928 | b |
| Scim31 | 45 | 86B1-2 | 3^{rd} instar | AC017117/Dom | b |
| Scim32¹ | 18 | 87C-D | — | AC017336 | NP_002386 |
| Scim32² | 14 | 87C-D | — | AC017336 | NP_002386 |
| Scim33 | 18 | 91A4-A6 | — | AC014473 | NP_005168 |
| Scim34 | 10 | 91F6-11 | — | AC015189 | AAA61314 |
| Scim35 | 22 | 92E-93A | — | AC014084 | b |
| Scim36 | 14 | 97D6-E6 | — | AC014839 | 226753 |
| Scim37 | 18 | 98C1-2 | — | AC019593 | a |

T.T. = transmission test data; high transmitters are in bold. We have been unable to localize one of the high transmitters and it is not represented in the table. Scim30⁵ and Scim30⁶ are also lethal over the SM1, SM5 and CyO balancer chromosomes. Scim29 and Scim53 exhibited a bimodal distribution of J21A inheritance and were retained as stocks even though they were outside of the standard <22% or >37% cutoff.
^{**}semilethal.
a = no Drosophila ESTs,
b = there are Drosophila ESTs but no significant homology was found. See Materials and Methods for a description of Human Accession No's.

[0134] TABLE 4

NA and AA sequences for novel loci

Scim4
AE003424 (insertion @188565)
Nearest ORFs are CG12497 @164549 to 167398 and CG13758 @216214 to
219666.
>>CG12497|FBgn0029621|cDNA sequence
ATGCTGGCAGATGATGAGTCGCTGCAGGGCATCAACGATTCCGAGTGGC
AGCTCATGGGTGATGACATTGACGACGGCCTACTGGACGATGTCGATGA
GACACTGAAGCCCATGGAGACCAAGTCCGAGGAGGAAGACTTGCCCAC
TGGCAACTGGTTCAGCCAGAGTGTCCATCGCGTTCGCCGTTCCATAAACC
GTTTATTTGGTTCCGACGACAATCAGGAACGGGGACGACGACAACAGCG
TGAGCGGTCGCAAAGGAATCGCGATGCGATTAATCGGCAAAAAGAACT
GCGCCGCAGACAAAAGGAGGACCACAACCGCTGGAAGCAAATGCGAAT
GGAGCGACAACTGGAGAAACAGCGCTTGGTCAAACGGACCAATCATGTT
GTCTTCAACCGCGCCACCGATCCTCGCAAGCGGGCATCGGACCTTTACG
ACGAGAACGAGGCATCCGGCTATCACGAGGAGGATACAACTCTCTATCG
TACCTACTTCGTCGTTAACGAACCTTATGACAACGAATACAGAGATCGA
GAAAGCGTACAGTTCCAGAACCTGCAAAAACTTCTGGACGATGATCTGC
GCAACTTCTTCCACAGCAACTACGAAGGTAACGATGACGAGGAGCAGG
AAATTCGCAGCACACTGGAGCGCGTTGAAATAGAGCTGCCCACTTCGGT
CAACGACTTTGGAAGTAAGTTGCAGCAGCAACTGAATGTCTATAATCGT
ATCGAAAACTTGAGCGCCGCTACCGATGGCGTATTTTCCTTCACTGAATC
TAGTGATATCGAGGAAGAGGCAATCGATGTTACATTGCCCCAGGAAGAG
GTTGAGGGCTCTGGTAGCGATGACTCCAGCTGTCGTGGAGACGCCACCT
TCACCTGTCCCCGGAGCGGAAAAACCATTTGCGATGAAATGCGCTGCGA
TAGAGAGATCCAATGTCCCGATGGCGAGGACGAAGAGTACTGCAACTAT
CCAAATGTTTGCACTGAAGATCAGTTCAAGTGCGACGATAAGTGTCTGG
AGCTCAAAAAACGCTGCGATGGAAGTATCGATTGTCTGGATCAGACCGA
CGAGGCTGGCTGCATTAATGCGCCAGAACCAGAACCAGAGCCTGAACCA
GAGCCAGAGCCTGAACCGGAATCTGAACCAGAGGCCGAACCCGAACCC
GAACCTGAGCCTGAGCCTGAGTCTGAACCAGAACAAGAACCTGAACCCC
AAGTCCCGGAAGCCAATGGTAAGTTCTATTGA
>CG12497|FBgn0029621
MLADDESLQGINDSEWQLMGDDIDDGLLDDVDETLKPMETKSEEEDLPTGN
WFSQSVHRVRRSINRLFGSDDNQERGRRQQRERSQRNRDAINRQKELRRRQ
KEDHNRWKQMRMERQLEKQRLVKRTNHVVFNRATDPRKRASDLYDENEA
SGYHEEDTTLYRTYFVVNEPYDNEYRDRESVQFQNLQKLLDDDLRNFFHSN
YEGNDDEEQEIRSTLERVEIELPTSVNDFGSKLQQQLNVYNRIENLSAATDG
VFSFTESSDIEEEAIDVTLPQEEVEGSGSDDSSCRGDATFTCPRSGKTICDEMR
CDREIQCPDGEDEEYCNYPNVCTEDQFKCDDKCLELKKRCDGSIDCLDQTD
EAGCINAPEPEPEPEPEPEPEPESEPEAEPEPEPEPEPESEPEQEPEPQVPEANG
KFY
>>CG13758|FBgn0029622|cDNA sequence
ATGACCCTCCTGTCGAACATTCTCGACTGCGGAGGCTGTATTTCCGCCCA
GCGCTTCACCCGCCTGCTGCGCCAGTCCGGCTCATCAGGACCATCCCCAT
CTGCACCGACGGCCGGAACATTTGAATCAAAATCCATGCTGGAGCCAAC
ATCCTCGCACAGCCTGGCGACCGGACGCGTGCCACTACTGCACGATTTC
GATGCCTCGACAACGGAATCGCCGGGAACGTATGTCCTCGACGGTGTCG
CCAGGGTGGCCCAATTGGCCCTGGAGCCCACCGTCATGGACGCACTGCC
CGATTCGGACACGGAACAGGTTCTCGGACTCTACTGCAATTGGACCTGG
GACACATTGCTCTGCTGGCCACCCACTCCGGCTGGAGTCCTTGCACGGAT
GAATTGTCCTGGCGGCTTTCATGGCGTAGATACGCGCAAATTCGCCATCC
GAAAGTGTGAGCTGGATGGTCGATGGGGCAGCAGGCCAAATGCCACGG
AGGTGAATCCGCCGGGATGGACGGACTACGGGCCGTGTTACAAGCCGG
AGATTATCCGTCTCATGCAGCAGATGGGCAGCAAGGACTTCGATGCCTA
CATAGACATTGCCAGGAGGACTCGAACCCTGGAGATCGTGGGCCTCTGC
CTCTCCCTGTTCGCCCTTATAGTTTCCCTGCTGATCTTCTGCACATTTCGC
TCGCTGCGAAACAATCGCACCAAGATCCACAAGAATCTTTTCGTCGCCA
TGGTGCTGCAGGTGATCATTCGCCTGACCTTGTATCTCGACCAATTCCGG
CGGGGAAACAAGGAGGCGGCCACCAACACGAGTCTCTCTGTCATTGAGA
ACACGCCCTATTTGTGCGAAGCATCCTATGTACTTCTGGAGTACGCTCGT
ACCGCCATGTTCATGTGGATGTTCATCGAGGGCCTTTACCTGCACAACAT
GGTCACCGTGGCCGTTTTCCAGGGCAGCTTTCCCCTCAAGTTCTTCTCGC
GACTCGGCTGGTGTGTGCCCATTCTGATGACCACCGTGTGGGCGAGATG
CACGGTCATGTATATGGACACCTCGCTGGGCGAATGCTTGTGGAACTAT
AATCTCACGCCCTACTACTGGATCCTCGAGGGGCCACGACTAGCGGTCA
TACTGCTAAACTTCTGTTTCCTGGTGAACATTATCCGAGTGCTGGTAATG
AAGCTGCGTCAATCGCAGGCCAGCGATATAGAACAGACTCGCAAGGCA
GTTAGAGCGGCTATAGTCCTACTACCACTTTTGGGTATAACCAATCTCCT
GCACCAGCTGGCTCCTCTGAAAACGGCCACGAACTTCGCGGTCTGGTCG
TATGGCACCCACTTTCTCACCTCGTTTCAGGGATTTTTTATAGCGCTAATT
TACTGCTTTCTAAATGGCGAGGTTCGTGCCGTGCTACTAAAGAGTCTGGC
CACCCAGCTGTCGGTGCGAGGTCATCCGGAATGGGCGCCGAAAAGGGC
ATCTATGTACTCGGGTGCTTATAACACGGCGCCGGATACGGATGCAGTG
CAGCCTGCAGGAGATCCATCGGCCACTGGAAAGCGAATATCACCGCCGA
ATAAAAGGCTGAATGGAAGAAAGCCGAGCAGTGCCAGCATTGTGATGA
TTCACGAGCCTCAACAGCGCCAGCGACTGATGCCCCGGCTGCAAAACAA
GGCGCGGGAAAAGGGCAAGGACCGGGTGGAGAAGACGGATGCGGAAG
CGGAGCCGGATCCGACCATCTCCCACATTCACAGCAAGGAGGCGGGCAG
CGCGAGATCGCGAACTCGCGGCTCCAAGTGGATAATGGGCATCTGCTTC
CGGGGTCAAAAGGTACTAAGAGTACCGTCAGCGTCATCCGTGCCACCCG
AGTCAGTTGTATTTGAGTTGTCAGAGCAGTAG
>CG13758|FBgn0029622
MTLLSNILDCGGCISAQRFTRLLRQSGSSGPSPSAPTAGTFESKSMLEPTSSHS
LATGRVPLLHDFDASTTESPGTYVLDGVARVAQLALEPTVMDALPDSDTEQ
VLGLYCNWTWDTLLCWPPTPAGVLARMNCPGGFHGVDTRKFAIRKCELDG
RWGSRPNATEVNPPGWTDYGPCYKLPEIIRLMQQMGSKDFDAYIDIARRTRT
LEIVGLCLSLFALIVSLLIFCTFRSLRNNRTKIHKNLFVAMVLQVIIRLTLYLDQ
FRRGNKEAATNTSLSVIENTPYLCEASYVLLEYARTAMFMWMFIEGLYLHN
MVTVAVFQGSFPLKFFSRLGWCVPILMTTVWARCTVMYMDTSLGECLWN
YNLTPYYWILEGPRLAVILLNFCFLVNIIRVLVMKLRQSQASDIEQTRKAVRA
AIVLLPLLGITNLLHQLAPLKTATNFAVWSYGTHFLTSFQGFFIALIYCFLNGE
VRAVLLKSLATQLSVRGHPEWAPKRASMYSGAYNTAPDTDAVQPAGDPSA
TGKRISPPNKRLNGRKPSSASIVMIHEPQQRQRLMPRLQNKAREKGKDRVEK
TDAEAEPDPTISHIHSKEAGSARSRTRGSKWIMGICFRGQKVLRVPSASSVPP
ESVVFELSEQ
Scim5
AE003506 (insertion @187490), nearest ORF (CG15816) @188338 (800 bp away).
>>CG15816|FBgn0030866|cDNA sequence
ATGTTGCAAGCCGCTAGCAGCACAACAACAGCACCAGTGGGAAATACA
GCAGACACAGGAAACAGTGAAAGCCCGATAATAGCGACGCCGGAGGAG
AAATCCCAAAGACGACGCTCCACATTCTATGTACCATTGGTAATAGAAG
ACGAAGAGGAGACCAAAAAGGATACGCCCGCAGATCATCTGGTCCAAA
AGTCCTCGAGCAATACGAGCCTAAGTAGCAATAGCAATTCCCTAACGAA
TTCCGAAACAAAATCATCGAAAAGCTATAGTCTGCGCAAATCGAGTTCG
GTGAAAAGCGGCGTGGCCAAGGTTAGTGCTCTCTTCGAGCGGAAAACTC
CATCGAAAATGTCGCCACCTTGCGGCTTCAATTGGAGCATCAGTGGCAG
CGAAAATACGGCCCAATACTCCGATACCGATGATGATGAGGAGAACTCC
ACGGAGGCACGTCATCGCGAACAGCTGCTCAAGACCCTGCCCAGCGGTA
ATAATAATTCCACCACCGCATCCCCATCGAAACTGAAACGATATGGCAT
CGTACTGAACGTCATCAGTTTGAATGGCAGCGATAACGAGCAGTCCTCG
TTGGGTAGTAATGGTAGCAGCATGCCATCCATGCCATCAATGCCAAACG
GCCAGAACATACCAAATGCGGCTGCGCCCAGGACTCATTTCAATGAGGA
GAACGACATTGTCCTGGCCACGCCCCCGCCGCCCAAACAGCAGGCACTA
TCCGCCGCTCATGAGTCTAACGACTACGATGATGACTCAGAAATAAGTC
GCATGCAGACGAACACCTCGACGCCCATAAAGCTAATGAAATCGCGATC
GCGAACCAATATACTAGCCGTACCGCTGCCATCGGTGGAGCGTGGTTTG
GCCACAACAAATACGACGCCCAATAATAATAATATCAATGGTAATAGTA
ATGGTAGTACCAGCAATACGACCACTACGACAACGACGACGACGTTGAT
TACGCTTCGTGCAAAATCGAAGACCCTGCCGCAAAATCTATCGCCCTCA
GTTGTTTTACGCGAGGCAGCCGCACTGGATGAGCTCGAGAAGAAGCGGG
AGAAGTATCAGGAGAAGCAGGAGAAGCGGGAAAAGCTGCAGGAGAAA
CAGCGTCAGCTGTTCGGCGGCAGTACGGCCAGTCAGATAGCGGGCTCTT
CGCCCTACAAACTGCAGAACAGCTGTTCGGCCACCTCGATACTAACGCA
CAGTTTTCCGCCGAAGAACCTTTTTCTACTTAAGTCCACGCCCAAACTGT
CAACGGATATAGCCGCGGCCACGCCCCCAAATACATCGGCAATCTGTTC
GCCGCCCAAGAAATCGCTGAGCTTCATTCGACGTGCCCACTCCACCAAG
GTGGCACGCAGCAATTCGCTGCTTAAACCAAATCAGGCTGGAATCCTAG
GATCGGGCAGTGGATCCAACGGACTCGGAGTCCATCAGGGCGTCATGCA
GGGAGCATTGTCCATCAGCTGTGCTGGGGACAATTCCAGCAACAATGGC
AGTTGGGGCAAACACTTCTACCAGCCCTACGATGTGTGTCCCTTGAGTCT
GGACGAGCTCAATTGCTATTTCCAGGCGGATCAGTGCGAGAAACTGATC
TGCGAACGATTCAAGATCAGGGATCTGGCCATACACATGGCATCCGCAT
CCGCAATTGGAGCGGATCTCTCTGTGACCACAGAGAATGAGACAACGGC
AACGGCGGACGACGATGCGGGACATCATTCGGGTAGGTCGATTCACCCC
CCCCCCCCAAAAAACGAAAATTCTTTGTCCCTGCTCAATGGGCAGCAAG
TACTACATACATAA
>CG15816|FBgn0030866
MLQAASSTTTAPVGNTADTGNSESPIIATPEEKSQRRRSTFYVPLVIEDEEET
KKDTPADHLVQKSSSNTSLSSNSNSLTNSETKSSKSYSLRKSSSVKSGVAKV
SALFERKTPSKMSPPCGFNWSISGSENTAQYSDTDDDEENSTEARHREQLLK
TLPSGNNNSTTASPSKLKRYGIVLNVISLNGSDNEQSSLGSNGSSMPSMPSMP
NGQNIPNAAAPRTHFNEENDIVLATPPPPKQQALSAAHESNDYDDDSEISRM
QTNTSTPIKLMKSRSRTNILAVPLPSVERGLATTNTTPNNNNINGNSNGSTSN
TTTTTTTTTLITLRAKSKTLPQNLSPSVVLREAAALDELEKKREKYQEKQEK
REKLQEKQRQLFGGSTASQIAGSSPYKLQNSCSATSILTHSFPPKNLFLLKSTP
KLSTDIAAATPPNTSAICSPPKKSLSFIRRAHSTKVARSNSLLKPNQAGILGSG
SGSNGLGVHQGVMQGALSISCAGDNSSNNGSWGKHFYQPYDVCPLSLDEL
NCYFQADQCEKLICERFKIRDLAIHMASASAIGADLSVTTENETTATADDDA
GHHSGRSIHPPPPKNENSLSLLNGQQVLHT
Scim6
AE003446 (insertion @55800), nearest ORF (CG6999) @55741 (60 bp away)
>>CG6999|FBgn0030085|cDNA sequence
AAAACGAAAGCTACAATGAAAAAAATAATTAATACATCAAAGCCAAAG
CGCAAGTCCACTTCCATGAAAGTGGAGGAGACTAAGCTAGACGAGGCG
CGCTGGGGTAAGCCGCAGACAAAGGAAGGTGAGTCTGCAAATGGGATA
GCAAATCCCTCAAATGACGATAAAAAGGAGCTGGCCAATTTCAAAGCCA
CCTTCAATTCCTGGGCCCCCGAGAAGAAACGCGAGAAGATGCACAAGGT
AGGCGTCATCTTAATATCCAACATACCCAAGGACATGGACGGGGACTGC
CTGAAGGAAATCATGAACTTGCACAGCGTCGTCGGCAGAGTTTACGTGC
AGCCGGAAACGCTGTCAAGTTTCAAGACAAAGAAGAACATGCGTAAGG
GCTGGGTGGAGTTCATTTCGAAAAGTGGGGCCAAAAAAATCGCTCTAGA
GCTGAACAATAAGCCTATAACCGATGGCAAGTCGTCCCGATTCCGTGGC
TTGCTGTGGAAAATGAAGTTCCTGCCACGCTTCAAGTGGTACTATCTAAC
CGATCGCATGGACTACGAGCTGGCGGTTTGCAAAGTTCGCGTATGGTCG
CAGGCCCGCAAGCGGGCCACCTTCTGGTACGATCCCGACCAGATGGAGT
ATTTCAAGAAGCAAGTGAAGAAGATGAAGAAGATGAAGAAGGTCAAGG
AAGCGGAGATGGCTACCAGGAATGCGGAGATGGCTGCCAAGAAAGCGG
AGATGGCTGCCAAGAAATTGAAGAAGTCTGCCTGAGTTCACGCTAGACC
TTTGCTTCCAATGTCTACCTGACTGCAAATATACTTCAATAAAGTAAATC
AAATC
>CG6999|FBgn0030085
MKVEETKLDEARWGKPQTKEGESANGIANPSNDDKKELANFKATFNSWAP
EKKREKMHKVGVILISNIPKDMDGDCLKEIMNLHSVVGRVYVQPETLSSFKT
KKNMRKGWVEFISKSGAKKIALELNNKPITDGKSSRFRGLLWKMKFLPRFK
WYYLTDRMDYELAVCKVRVWSQARKRATFWYDPDQMEYFKKQVKKMK
KMKKVKEAEMATRNAEMAAKKAEMAAKKLKKSA
Scim7
AE003574 (insertion @132480), nearest ORF (CG13238) @122949 (10 kb away)
>>CG13238|FBgn0031198|cDNA sequence
ATGCGGCCCATCATCATTACTGTTTTGTCCGGGCCACAGGTGTACATCGT
ACAGGTGCACTGTCGTAGCAAAAACATACCTGACGTCTACATCCTGACC
GTTACCCAGATGCTCCAGTACGTGACCGACCCAAAGGAGCTTCGCGATG
TCAGCCAAATTGAGTCGTGGAAGTGCGACAAGAGCGTGTCTGTAGCCCC
CAAGCCCTGCAATATCTGGCAGACGTGTGCGCTGCCCTTCAAGATTCCC
GAACAGAATCTGACGGATACGCGCTATATGGAGACCTGTCGGGAATGCC
CTAATGTGTATCCCTGGCTGGGCGATGCAGGCGGTACGGGAATCGCGGG
TCGCGATAACTATATCTTTGCCGGTGGCGAAAATCCAGAGGAAGAAGAC
TCTGCGAAGTAG
>CG13238|FBgn0031198
MRPIIITVLSGPQVYIVQVHCRSKNIPDVYILTVTQMLQYVTDPKELRDVSQIE
SWKCDKSVSVAPKPCNIWQTCALPFKIPEQNLTDTRYMETCRECPNVYPWL
GDAGGTGIAGRDNYIFAGGENPEEEDSAK
Scim8¹
Scim8²
AE003490 (insertion @120150), nearest ORF (CG4004) @120304 (200 bp away)
>>CG4004|FBgn0030418|cDNA sequence
TCGAATCGAGCGTGAAAACGTGCAATAAAACCAAAGTTAACAAAAACA
AAAAAAAAAAAACCAGACTACTTAATGTCCCAGATGGGCGGCACATGCT
TGTACGATGAGCCCGAAATCATGGAGGAGTTCATCAGCTGTTATCAGTA
TTTCACCGCCCTGTGGGACAGCAGCAGTCCCGATTATCTATCGAAACAG
AAAAAGGAGCCCGGCTATCAGGAGCTATTGAAGATACTGCGACGCGTTA
ATAGCAACTGTTCGATTCAGGATGTTAAGCGAAAGATAAACTCGCTGCG
TTGCTGCTATCGTCGTGAATTCAAAAAGGTACAGGAATCGGTCAATGGC
TACCAGACGCGTCTCTGGTGGTTTCATCTGATGGATTTCCTCAAGCCGGT
ACTCAACATACAATCGCCGGCCAGGGTGAAATCCGAGAACGTGGACGAT
AGTCTCGACGAGACCAGCATTCAGGATGTTGACATTATGTCTGATGCCTT
TCCACACGAAGAGGATATGCTACGTCTTGATGCCGTGGGTGATGGCGAT
GTTGAACCGGAACCCGAGCCTGATAACGATCCCGAATTGGATAACATGG
ATGATCATGTTGATGATTATCGTAACAATTCATCGGCTGGGAGCATTAAG
AACAATGGCTATCAGCAGCACACCGTATCTTCGCACCAGCAGCATAACG
GTGAATCGCAGACTTCGGATAAATCCGGACGTCGCATCCGTAACCGACG
AAGACGCAGTAGCAATGACACCGATTACGTTGAAGCGGCGAGAAAGCG
TAGAAATGTGGAGACTTCGAATAGAGATAGAGACTGGCATAGAGAGCG
GGATAGGGAGCGAGACAGAAAGCATGAAAGCGACAGCGAGTACGAGTG
CGAGCTGA
>CG4004|FBgn0030418
MEEFISCYQYFTALWDSSSPDYLSKQKKEPGYQELLKILRRVNSNCSIQDVK
RKINSLRCCYRREFKKVQESVNGYQTRLWWFHLMDFLKPVLNIQSPARVKS
ENVDDSLDETSIQDVDIMSDAFPHEEDMLRLDAVGDGDVEPEPEPDNDPEL
DNMDDHVDDYRNNSSAGSIKINNGYQQHTVSSHQQHNGESQTSDKSGRRIR
NRRRRSSNDTDYVEAARKRRNVETSNRDRDWHRERDRERDRKHESDSEYE
CEL
Scim9
AE003422 (insertion @182395), nearest ORF (CG3587) @174339 (8 kb away)
>>EG:39E1.2|FBgn0023521|cDNA sequence
GCAAGCACATATCTAAATCTAGCTCGAAACCAGATGGATGCTCATCTTG
CACACTGTCACCAGTGTTGGTAACCGAGTGCATTGTGAGCGGAACGTTC
CGACACCTACTTTGTTTATTTATTGTTATTAATTAGGAAGCATGCCCCTC
GTGGTGATTACGGGCCTGCCAGCCAGCGGAAAGAGCACACGTGCCCGCC
AGCTACGGGATCATTTCGTGGAGCGCGGCAGGAAGGTGCATCTAATCAG
CGAAAACGAGGCAGTGCCCAAGGCGGGTTTTGGAAAGAATTCCCATACA
GGTGATTCGCAGAAGGAGAAGGTGGTACGTAGCGATCTTAAGTCGGAAG
CCTCGCGTCACCTTAACCAGGAGGATCTGGTCATCTTGGACGCCGGGAA
CTACATCAAAGGCTACCGCTACGAATTGTACTGCATGTCCAAGGTGTCA
AGGACCACCCAGTGCACTGTGTTTACCTGCATACCCCAGGAGGAGGCGT
GGACCTTTAATAGCCAAAGAACGGCGCCGGATGAACTGCCTGGCGACAG
TGAAAGAGTTCAGCCGGTGGACAACTCGGATGTTCCCTACACCAGAGAG
ACTTTTGATGCTCTGTGCCAGCGCTACGAGGAGCCGCAGAGCAACAACC
GTTGGGACAGTCCGCTGGTGGTAGTCTTGCCCAAGGACACGCTCGACAT
GGAGGCCATCTACAAGGCCTTGTACGAGTCCCAGCCACTGCCACCCAAC
CAGAGTACTTATAATGCACCGCTGGGAACAACCAACTACCTGTTCGAAC
TGGACAAAATCGTGCAGGCGATCATCAAGGAGATCCTCGGCGCCGTCAA
GATCAAGGCCTTCGGCCAGCTGCGCATCCCAGGGAGCAGAAATCCCGTG
AAGGTCGCCACTTCGATGAATGCCCTCCAGCTGAACCGCCTGCGCCAGA
AGTTCATCACGAGCACGTGCCACGCCAGCCAGACGTCACCCACTCCGCT
GGAGCAGGTGCCGCACTTGTTCGTGCAGTTCATCAATGCCAACACGATC
GGCTGCTAG
>EG:39E1.2|FBgn0023521
MPLVVITGLPASGKSTRARQLRDHFVERGRKVHLISENEAVPKAGFGKNSHT
GDSQKEKVVRSDLKSEASRHLNQEDLVILDAGNYIKGYRYELYCMSKVSRT
TQCTVFTCIPQEEAWTFNSQRTAPDELPGDSERVQPVDNSDVPYTRETFDAL
CQRYEEPQSNNRWDSPLVVVLPKDTLDMEAIYKALYESQPLPPNQSTYNAP
LGTTNYLFELDKIVQAIIKEILGAVKIKAFGQLRIPGSRNPVKVATSMNALQL
NRLRQKFITSTCHASQTSPTPLEQVPHLFVQFINANTIGC
Scim 10
AE003438 (insertion @216460), between two OREs (CG14439 @213729 and
CG14438 @219903)
>>CG14439|FBgn0029898|cDNA sequence
ATGATACCTATTCTGGAGAAACTCAGCGGGTTCTACAACACCTACGTCTT
GGCCGTACTCACCATTGGTTATATCCTGGGCGAATTGGGTCACTATCTGA
TCGGAGTGACCTCCAAGCAGACGGCCATTGAGTTGGACTACGGTGATCA
TGCCTGCCAGCAGAACACCTCGATGTTCAATCGCCACGAGTTGCCCACC
CAGTGCTCGGCGGTTATGAATGAGACCAGCTGCTATGCCCTTGATTTCAA
CGGCACTGGCTATTGCGAGTGGAACTACAATGGACTGGGCATCGACTAC
CAGATCCTGGCCGGACCCACCTTCATCCTGATTTTCACCATCGCCGGCGT
ATTTATGGGCTTCGCAGCGGACAAGTACAATCGCGTCAACATGCTGACT
GTGTGCACAGTGATCTTCGGCATTGCCATGATTCTGCAGGGCACCGTTAA
GGAATACTGGCAGCTGGTAATTTTGCGTATGATCATGGCAGCCGGCGAG
TCGGGTTGCAATCCCTTGGCCACGGGCATTATGTCCGATATCTTTCCGGA
GGATAAGAGAGCACTAGTCATGGCCATCTTCAACTGGGGAATTTATGGA
GGATATGGAATCGCCTTCCCCGTGGGTCGCTACATCACCAAGCTGAATTT
CTGGAATCTGGGATGGCGCGTTTGCTACTTGGGCGCCGGTGTCCTTACCG
TAATTATGGCCGCACTGACCGGAACCACTTTGCGGGAGCCGGAGCGCAA
GGCCATCGGTGAGGGTGACCGCCAGACGTCTAGCGGCAAACCAGTGAG
CCTGTGGCAAGTTATCAAGAATCCGGCAATGATCATGTTGATGATTGCC
GCGTCCATCCGTCACTGCGGTGGCATGACCTTTGCCTACAACGCCGATCT
CTACTACAACACGTACTTCCCCGACGTGGACTTGGGCTGGTGGCTCTTTG
GGGTCACCATTGGCATTGGCAGCGTGGGTGTGGTCGTCGGTGGCATTGT
GTCGGACAAGATTGTCGCCAAGATGGGCATTCGATCACGCGCCTTTGTA
TTGGCTGTTAGCCAGCTAATTGCCACACTACCAGCCTTCGGATCGGTCTA
CTTTGACCCGCTGTGGGCCATGATCACGCTGGGCCTGAGTTATTTCTTCG
CCGAGATGTGGTTCGGTATTGTCTTTGCCATTGTTGTGGAGATTGTTCCG
CTGCGCGTTCGCTCCTCGACCATTGGCGTCTTTCTGTTTGTGATGAACAA
CATTGGCGGCAACCTGCCCATCCTGGTGGATCCGGTGGCCAAGATCCTG
GGCTATCGCGGTTCGATCATGATCTTCTACGCTGGATTCTACGGCATCAG
TTCTATTCTCTTCTTCATCACCTGTTTCCTGCTGGAAGGCAAGCCTGATG
AGGTGGGACAGCCGGAGTCGCCGAAGAGCCATCCGGATGCCGTGCTCA
ATGCTCGCCACATGCACGGACACGACAACTCCGTGTTCTCCGTGGACGA
GACCTTGCCCTCCAACGGACGTCCTGCCCAACTTCCGCAGCATCTGCAG
ATGTCCAGCAATGGATACGACAAGTCCCAGATTTCTCCGCCACGACAAA
ATGGCGCGGAGAGCAGTAGACTATAG
>CG14439|FBgn0029898
MIPILEKLSGFYNTYVLAVLTIGYILGELGHYLIGVTSKQTAIELDYGDHACQ
QNTSMFNRHELPTQCSAVMNETSCYALDFNGTGYCEWNYNGLGIDYQILA
GPTFILIFTIAGVFMGFAADKYNRVNMLTVCTVIFGIAMILQGTVKEYWQLVI
LRMIMAAGESGCNPLATGIMSDIFPEDKRALVMAIFNWGIYGGYGIAFPVGR
YITKLNFWNLGWRVCYLGAGVLTVIMAALTGTTLREPERKAIGEGDRQTSS
GKPVSLWQVIKNPAMIMLMIAASIRHCGGMTFAYNADLYYNTYFPDVDLG
WWLFGVTIGIGSVGVVVGGIVSDKIVAKMGIRSRAFVLAVSQLIATLPAFGS
VYFDPLWAMITLGLSYFFAEMWFGIVFAIVVEIVPLRVRSSTIGVFLFVMNNI
GGNLPILVDPVAKILGYRGSIMIFYAGFYGISSILFFITCFLLEGKPDEVGQPES
PKSHPDAVLNARHMHGHDNSVFSVDETLPSNGRPAQLPQHLQMSSNGYDK
SQISPPRQNGAESSRL
>>CG14438|FBgn0029899|cDNA sequence
ATGGAGGATAGCGAGGACGACGTGGTGGTGGTGAGCTGCGATACCTCGA
TGAAGGAGAAGGTAAAGGCCAAGCTGGTGGAGATCCGTAAGTTTGTGCC
CTTTATCCGGCGTGTGCGAATAGACTTCCAGGATACTTTGTCCAAGGTTC
AGGGTCATCGTCTGGATGCCCTGGTTAACCTGCTGGATCGCGAGGACGT
ATCGATGAGCTCTCTTAACAAGATCGAGGTGATCATTGATAAGCTAAGG
ACGCGCTTCAATCCGAGGATCGAAATTGACACTGGCGAAATCATTGATA
TCACTGAAAACACTGACGCCAAGGCATCGGATGAGGGGCAGCGGTCAC
CTGCAGAACCACGTGCCGCCCTTCAAGCTATAGTTCAAGATACGAAAAC
ACCAACCATTCCAGAACCAACATCACCAGCGGCGCTTAAGCATTCCTCC
CTTCGTGGCAGTCGTGGATTTCTGGCTGTCATGCAGAAGGCCTTAATTGA
AGAGAAGAAGCAGCGAGCTAGCGAACAGAAAACTGATAAAGAAACTAA
CGGTGTAACGCAGCTAGAGACAAACTTCTCGCGGCGATCTTATACAACA
TCGTCACAGTCAACCTGCCGTTCTTCAGAAATATCGGTAAGAGCAGAAA
ACCCAGATTTTAAGCGACGAAGCACATCGCTTGTGCAGCATGCTCCTCT
ACAGGAGGCCTCCCCAGGGCAATCCAAAAAAGACTTGCCCATATCCTTG
TCGGTACAGGGTCTACCAGCTTTGGTCAGTGCCAGCACTGCAAGTCCAG
CAAATACGCTTGAGGAGGCCCGCAAGAAGCTGGCGGCCTTGAAATATGG
ACTAGGAACAACGGTACCAAGCATGCCTCCACTGGCCTCCAATATAAAT
GATCCACGCGGTAGAAAAGGAATAAACCTGCCTGAAACTAACAACAAT
AAAGACAACGACTTGGGTATAGCGCTGCAATCCCCGCCGCCTATGCGGA
CTCCCTCGCCTATTCCGCCGCCACCAAGGATGAAGGCCGGTACGTGGGC
CTCATTTTCAAATGTTCCCCAGGAAAGCGCATTTACAGGCCAGCATGCTG
TGCAGCGCAACTCGGTACCTCCGGGAGATTCTCGAGCCTTTGGGGATGC
TTTGGCACATGAACCAAGGTCCTTCTATGGCACTGATTCCCGAGAACCCC
GAGACCCTCGTATCTGGAAGAGCAAGACTTCCCAACAGCAGCAACATCA
GCAGGCGCCACAGGCACAAATTCCTCCGTATTCCAGTGACCCGCGTCGT
TCTATAAGCACTTACAGCGGTTTCGAAGAGGGCGGATTTCGCGGCGGTC
ACAACAAACGGGGCTTTGGACGACACAATGACGTGCCACGCACATATGG
GGAACACCGCAAAGCCAAGGCCCGTGCTGAGGCGGAGGCCAAGGCTAA
GGCTGAGGCGGAGGCCAAGGCTAAGGCTGCGGCGGAGGCCAAGGCTAA
GGCTGCGGCGGAGGTACGCCAATTAGAAACGGAAGTTTCGCGGGAGAT
GGAAGCCCAAGAAAAAAATAAACAGCAAAAGGAAAAGCCGGAGGAGA
GCGAGGCGGAGAAGTCGACGATCGCAGTGACTCAGGTTCCGGAATTGGA
CACCTCCTACCGCAACGTTAATCTGGGGGTGCTAAACAAGAAGCTAGAC
TTTCGAATACCGAAGAAAACCCTCCCACCGGCAACAACAATAACCTCAA
CAAGTCCAGTCAATGGTAATGGGGAGAATCCAAGCTGCCCCTCAAATTC
CCCCACAAGCAAAAGCTGTGATGCCAACCAGGACAAAGATACTTATAAG
AATAAAGATAGGTATTTAAATAAGGCTAAGGCTAAAGACAAGGTAGAT
AAGGGCAATGAGGTGTCGGAGAACAATCTGGATAAGTCTGAGAAGCTTG
AAAAATCGCAGGATAAGAAGGCAAATGACAAGGAGAACAAGTCCGACA
AAAAGGAGAAGAAGAGACTGAACAGGGAGCCTGAAAAGAAATCAAAG
GTTGAGAACCCCCTCGAGATTGTGGACTCGAATAGCGTGGTCAGTGAGG
AAAGCTCGGAAAATACAGACAATGTGGAAAATGAACCGCCTCTTAGCGA
GACTAACGCGTCTCCAGTTCCAGAGCTAGCTACCAGCACTCAGGACAGT
CAACAGGACCAGTCAGTGAGTGAAGAGTTGGACATCCTfGCCAAAAACC
GTAGAATGTCCGGAACTAGAATAAAGACTCCCATTTCGTCTACTGGAAA
CCCTGCACTAAAGCGACGGGCAGATGATGATGTTGAGGACAAGTTGGAA
AATCCGACTAAAAAGAACTGCGCAAAGTGGGAGGCAAAGCCTGACAAG
GAAAAATCGGAGGATGATACCATCGACAAGATTAAATCCATGAAAGTA
ACTAAATTCGCTGATGTCGAGATGAAGGTTACAGAAGAAAGCCAGAGTG
CTGAGGAGGAGGAGATTACTGAGCAGAAAGAGAGTACTGAGGAGGAGG
AAGGTACTGAGCATAAAAAGAGTACTGAAGAGAAGGATAAGCCGCCAA
AAATCTCCAAGATAAAAATTGTCCTTACTCCCATTGCCCATACAACACA
AGTGGTTCGTCCTAATGATGGCTTCAAGAACAATCAAGAAAAGATCTTG
GACAACATGGCAACTGATGAGCACGATGATGAGGAGGTCCCCGGGCCC
CCAGCTCAATTCCTACGCCGGATTATGCAGCGTCGGAACTCCTTGGCTCC
TACGTATATGAAGCCGATGGTGGACAAGGATAAGATTGCTTCTTCCAGT
TTTACCTACGAGGATCTGCCGGAGCAGAAGCGCGGAAATCAGAACGCCC
GAAACCTGGCCATCATTTTCGAAAAAACTAGTGACAACTGCAGCGTGTC
CACTCAAAACATTATTAATGGCAAACGTCGCACTCGTGGATGTGAGACC
TCTTTTAACGAGACCCAATTGAGCCGAAACATCTTTGGCATGGGCCAGA
TAAACAGGTCGCGGCCAAAGGCCACCCGAGGGCAAGCTATTCACAAGG
AAACAGAGGATGATGTGGAGATGAAGCCTAAGAAGGCTCGATTGGAAG
CACAGGAGATAAATGGGGTCAGTGTTACGCCTGATGAACAGCAGGTAGA
GAACAACGTGGAAGTCACCCAAAAGGAGGTGGAAGCAATATCCTCAGA
GCCACTTCTCTCTTCTGAGGTTGAACCGACACGAAAGCCTCGCACGAAA
CCGCGAAAAAACGAGCTGGACAAGCTAAACGACGACATTGCGCAAATG
TATTACGGGGAGGAAGTGATGCGTGCCACCAGTCGCAGGGCTTGTACCC
GTCGATCGCGCACGTCCTCGCACACGCGCACCAGTAGCCAGCATTCCAG
GACGTCCTCTGTATCGCGAACCGATAGCATATCCACCGTATCGGATATTA
GTTCCATAATCGTCAGGAACACGGCGCGAAGGGGTAGAGGCATCAGATC
ATCCGAAAATGGCATCAACCGTGCCACGTTTAATGCATCCTTGAATGCA
AAAAAACCAAAGTTGTGCCGTGTTAGAATAAAGCGATGTGCTGCATTGA
TGGAGATGATAAAGGACCAGGAAAAGGAGGAACAGGAGAAGAAGGAG
CAGAAGAATAAAGAACCGAAGAAGAAGAAAGTGGGTGTGCAAAAAAA
GCCATTGAAAAGTAAGCCGAAAAGAGAGAATAGCGTTATTCTTAACACA
AATCCCGAATGGCACTCCATTTCGAAGGCTGTTATCAAGTGTGTCGTCTG
CTCGAAGTGGGTTCGCAGGAGCCCACTCTCTCATTATATGATGTGCCATA
AGGAGCACTATGCCGCCCGATTGCCACCCGATGTGCTTAAAGAGCTGCG
GGCCGGGCGCGGAAATCGACCGGATTACTGGGTTTCGCAACGCGGCGGC
TACACATTGCACTTCACTTGCCCGTTCTGCCAGAAGCCACTGCTACTCTG
CCAAAAAGGCATGATCGAGCACTTGATCGGCCATATGGGCGAGTCTCGT
TTTTACTGCTCCAACTGTAATATGCCACAGAACCGCCTCAGTAGGCTGCT
GGACCACACCGCATCCTGTGGGCCAGGTGCGAAGCCTTTAAGTAGCAAA
ACCGTCTGCCTACCGATGAGTGTTCACGTGTGCCACATCTGCCAGTTTAT
GCAGTACAGCAAGGAAAATATGGACCGGCATCTTACTGTTCAGCATGGC
CTAACGAAGGAGGAACTAGAAAGTGTGGAGCGCGAGGAGTTGATGCTC
TGCGACACAACAGACGTACCATATGCAGATTCGAATAAGGATGGCAGCG
CCCGAGAAAGAGAAGAGCAGGATGACCAGAACATGACCCAGGCTAACG
AAGGGTCGGAAGTGCCGGAAATACCGCCGCCTCCGCCAGAAATTGAGCC
CTTGTTTGTGGTCAATGAGTGTCTAATGACCTCTGAAATGGACACGGACA
TGGAAGAAGTCTTGGAACAGCCCGTTCAACATATGAGCTTAATGGTAGA
CGAAAAGCCTGTGACGCTACTCAGTGGGGCCACAGAACAGCTGGAGCCT
AGTGTCCCTGATCCCGAGCCTGTTGTTCCATCTGCACAAGATGATGGCAA
AGATGTAAATGAAGATGAAGACGTAGACGTGGAGGCAGTAGTGGATTC
CCTTCAGTCACACACTGACCAGACGGCTACTTCTATGTTAGCAGAAGTC
AGTCTAGCCGAATTGGCTGGGGATGTACTTGATGGTATTGGCAGCGACG
CGTCCGACTATGAGATGGATGATAATTCAGAGCAAGTGGATACAACTAA
CAAAAACGGCTACGGTGATGATGACGATGATGCGCTTACCGACGATTGG
GTGGATCTGGAGACTGCCAAGCGCAATTCCAAGTCCGCCAAGAGCATTT
TTAGAGTGTTCAATCGCTTCTGCTCGCGTTTAAACAAATTACCCCGATCC
AGCAGAGCAGTGCCCTCGAATGGGAGTGAAAACAGCGATGGCAGCGAC
AACAACGACGACGACGGCGATAATCCTGATCCCAGCGAGCTAATGCCAA
CAATGCAACCATTGGAGCCGGAGCCAGAGATGGGGGATTCATCCACATC
TACAGGTGCTAAGTCGCTATCCGAACGGGTGGAGAATGTGGGCTTTCAA
AAGCCCTCTTCAGACGAGGATCAAAATCGCGTGGCAGCATCCTATTACT
GCGTGCAGCCGGGTTGCACTTTCCTCTTTTCCAATGAGCTGGAAGGCCTC
GAGAATCATTTTGCGTTAGAGCACCCTCTTGTTCGATGGAGCGGCAAAT
GTGGCATGTGCCGTCAGAAAATCACGGCAACGGAAACGAATCTCAGAAT
TTCTGAAGAGTTGCGCCACATGAGGGACGTGCACATGAAGGACATATCC
ACCCTGCCTCCTCCTCAGTCATCTGCGGTTGAAAGCCCAGCCGTTATTGA
ATCCTGCCTGAATCAGCGTGAACCAGTACCTGAATCAGAACCTGATCCC
GTTCCTGAGCTTCCCAAGCTGCGTGTTCGACGCTTCACTGGGGATCGCCT
TGTTGTGGATTCACAAGCGGAAAAGAGCCAACCGGTAGCAATAGTTGTC
AGTGATGATGATAATCCGCGAAATGGGATGCTAAGGGACTTGCTGGCGG
CGGATCCACGGCCACCCAATCAGCAGTTGGACCTCCAAGCCGCTGGACT
GGGCGAGTTCCTTTGCGCCAAGCCCGATTCACCGTCAACAGAACCGGTC
AAGCAGACGCCCGTAATTGTTGGCTATTCGAGTGGCTTGGGCTTGAAAA
TCGGCCAGGTCCTTAGCAGAACTCAGATTTCAGCTAACTCACGGCTATC
GCCAGTCGTTAACGATCCCCTGCCAGAGAAGTCTTCTGCTCCTGCTGCCG
TTGAAGAGAATCGTAATCGATTCAGGTGCATGGCCACCAACTGCAATTT
TGTTGCTCACAAGCTCATGTTCATGCGGGAGCACATGAAGTTTCACAGCT
ACAGTTTCAGCAGCACCGGTCACCTGAACTGCGCGTACTGCTCCCATGT
GGCAGTCGATGTGGATGATTACTTGCGCCACGGAGTGATCATTCACGAC
CTGGCACCACGCTCCGAACTGGAGAGTTCAACTGGACCACCATCTGTTA
CCCAGAAAATCCGGGATATGCTCAGCCAGCGGGAAAATGGTCGTGTTCC
ACCACCAACTCCTCAAGTCACTCTGTCTGATGTGGTCCTGGGTCTTTTAG
AATGCACCGGATACAGCGAGGATAAACTGTACGCCTGTCCCCAAAAGGG
CTGCATCGTGCGGCTGACAGATGAGCAGCTTGTAAACCATTTGCGCTAC
CACATTCGTAGCACTCATCAGGGCAGCGAGTTGGTGAAATGCAAGTTTT
GCACCAAGGCGATGCATCCGCCGGCACTTCGTACGCATCTGCAGCAGTA
CCACGCCCGGCACAGCATCTTCTGCGGCATTTGCTTAGCCACATCGGTCA
ACCAGCGCATAATGATGTATCACATGAGCACGGTGCACTCCAAGGCCTA
CGGCCGGCCTAACGCGCGGCTGGCGTTTGTGTCACTGCCCGTGAAGATC
GACGCGAGTAAGAAGAACGTAGAAAGCGAGTTCTACGTGGCCGTCGTG
GAACAGCCCTTTGGCAACCTCCAGATGCAGGATTTCCAGCGCAAGCTGT
TCGATGAAATGGACCGTCGGCGTTCGGGAACAAAGACGTACTTCCGCAG
CTCCGAGGTGCATATCCTGCCAACGCAGCCAACATTCCAGCGACCGCTA
TACTGTACGGAGTGCCCCTTCTCCACCACGTCAAGGGTTAACATGCAGA
TGCACCTCTATGAGCACAAGGATGAGACCATTCGGGAAGCCTCCAATT
GGCGGACTTGATAGTTCCAGCAACCTCTTCGGTATTAACTGTTTCGGCGA
GTACGTTGGTGGCACCGCCGAGGCCAGGCAAAGATTCAGAAAAACCATC
TACTTCCGGACAAAGTGGTGATGCAGCGACGGAGCAGCTGAATCCAGAT
GTTCCTGGAACCCACAAGCCCATCAAGCCACCGTTACGCTATGTGCCCC
CGGACCAACGCTACCGCTGTGGCTTCCTCCGATGTAGCGTCCTTTGTTTT
TCGGAATCTGCGGTGCGCAAACACATGCAGGCTAACCACAAATACTCGG
AGGTGGTAAGGTGCCCGCACTGCAAGAACTGCCAGGGTCAGTTTGGAGT
AGATAAGTACTTTGACCATCTTGCAATGCATAAGCGGCACATCTTCCAAT
GCGGCGCTTGCTCACGTCACAATAGCAGGCGTGTCATCGAGCGGCACAT
ACAGGAACGTCACAATATTCAAGATGTGGACATGATCGTACACCGCCAT
AATGACAGCAACAAAACGACCGAAGCCCGCTGGCTGAAGGCGCCTAAA
TTGGCACGTCATTCGCTAATGGAGTACACGTGTAACCTGTGCCTCAAGTA
CTTTCCAACGACCGTGCAGATCATGGCCCATGCGGCGTCCGTTCACAAA
CGCAACTACCAGTACCACTGTCCGTACTGTGAATTTGGTGGAAACCTCG
CCACCGCGCTCATTGAACACATCCTTCGCGAGCACCCGGAAAGGGAAGT
GCAGCCTGTGCAAATCTACCAGCGCATCGTGTGTAAGAACAAGCAGACG
CTAGGCTTCTACTGCACCACCTGTCACGAGGTGGCCAGCAGCTTCCAGA
AGATCGCTATGCACTGCGACAAGGAGCATAAGTCGCGCAATCCGGTGCA
ATGTCCCCACTGCATTTTCGGGCATTTGGCCGAACGCCAGGTTGTCTTAC
ACATACAAGAGAAGCATCCCCATGAACGCGGACTGGCAATGGTGCAGTT
CGAACGCGTGCTTAATGACATCCCGAACAGCATAAGCTGGGAGATAGGT
CGGCCCATCGAAGTGGAGCCTGAGAAGGAGATCCCGAACAATGGGGAG
AGTGCATTCCTGCCGCTAAGCCAGAGACAGGTTGTAACGGAAGTGGTGG
ACCTGCTGGATTCAGACGACGAGGCGGACGAGTACGGTGAACAAGATG
ACGCGAAAATCGTGGAGTTCGCCTGCACACACTGCGACGGGACAAACAC
CAACTTGCCGGACCTACGCTCCCAGCACTGGGCCCGCGAACATCCCGAC
CAGCCCTTCTATTTCCGCGTTCAGCCGATGCTGCTCTGCTCCGAGTGCAA
GAGATTTAGGGGCAATGCAAAGGCACTTCGCGAGCACCTGCGTGCGACA
CACTCTATCCGGAGCATAGTGGCTGCGGACATTCGTCGACCGATGGAGT
GCGCTTACTGCGACTACCGCTATAAAAACAGGCACGATCTTGCGAAACA
CATCAGTGAGATAGGTCACCTGCCCAATGACCTGAAGCACGTAACAGAT
GATGAAATTGATGCCCTGATGCTGCTCAGTGCCAGTGGAAGTGGTGGGG
CTGTTAACGAATACTACCAGTGCGGATTGTGCAGTGTGGTTATGCCAAC
GAAGGAGACAATTGTCCAGCACGGCCAAGTGGAACACTGCAAGCCCGA
CGAGCGTTTCTGCTTCCGGCAGCTAGTGTCGCCAGTGATATACCATTGTT
CCTTCTGCATGTTCAACTCGACCGATGAGCTGACTACGCTGCGCCATATG
GTGGACCACTACAGCCGCTTCCTGGTCTGCCATTTCTGCACACGCTCTCA
GCCGGGTGGTTTCGATGAGTACATCCAGCACTGCTATACCTACCACCGG
GACGATATCAAATCCTTCCGGGACGTGCACACGTTTAGCGATCTGAAGA
GGTACCTTAGTCAGGTGCATTACCAATTCCAGAATGGGTTGATTATCACA
AAAAGCAGTCTCCGTTATACACGTTACAAATCCGACAAATGTATGCTTG
AGCTAGACGCTGAGCTAATGGCCAAGGCCCAGCGGCCACCCATTCCGCG
TCTGCATATCAGACTCAAGTCGACCGGCGTTCAGATGCAGAGCCCCGAG
GGGGCTGATGTGGAGAAACCTGTGTCGTTGTTGCGGATCACAAAGCGAC
GAAAAACGCTTAATCCTGGCGAATTGCTCCGCTCATTCCGCGAGGAGAA
TGAGGTACAGCCACAGCCACCGGCCTCTTCAACATCGTCGGGGACGGCT
CCTTCTCCTGCGGCAGGTTCTGTGTTCAACCTGTTCAAGCGCCGCAACAG
TCTCGTTGTCCGCCCAGCAACCAGCAACTTGGATCAACACTAA
>CG14438|FBgn0029899
MEDSEDDVVVVSCDTSMKEKVKAKLVEIRKFVPFIRRVRIDFQDTLSKVQG
HRLDALVNLLDREDVSMSSLNKAEVIIDKIRTRFNPRIEIDTGEIIDITENTDAK
ASDEGQRSPAEPRAALQAIVQDTKTPTIPEPTSPAALKHSSLRGSRGFLAVM
QKALIEEKKQRASEQKTDKETNGVTQLETNFSRRSYTTSSQSTCRSSEISVRA
ENPDFKRRSTSLVQHAPLQEASPGQSKKDLPISLSVQGLPALVSASTASPANT
LEEARKKLAALKYGLGYfVPSMPPLASNTNDPRGRKGINLPETNNNKDNDL
GIALQSPPPMRTPSPIPPPPRMKAGTWASFSNVPQESAFTGQHAVQRNSVPP
GDSRAFGDALAHEPRSFYGTDSREPRDPRIWKSKTSQQQQHQQAPQAQIPP
YSSDPRRSISTYSGFEEGGFRGGHNKRGFGRHNDVPRTYGEHRKAKARAEA
EAKAKAEAEAKAKAAAEAKAKAAAEVRQLETEVSREMEAQEKNKQQKEK
PEESEAEKSTIAVTQVPELDTSYRNVNLGVLNKKLDFRIPKKTLPPATTTTSTS
PVNGNGENPSCPSNSPTSKSCDANQDKDTYKNKDRYLNKAKAKDKVDKG
NEVSENNLDKSEKLEKSQDKAANDKINKSDKKEKKRLNREPEKKSKVENP
LEIVDSNSVVSEESSENTDNVENEPPLSETNASPVPELATSTQDSQQDQSVSE
ELDILAKNRRMSGTRIKTPISSTGNPALKRRADDDVEDKLENPTKKNCAKW
EAKLPDKEKSEDDTIDKIKSMKVTKFADVEMKVTEESQSAEEEEITEQKESTE
EEEGTEHKKSTEEKDKPPKISKIKIVLTPIAHTTQVVRPNDGFKQEKILDN
MATDEHDDEEVPGPPAQFLRRIMQRRNSLAPTYMKPMVDKDKIASSSFTYE
DLPEQKRGNQNARNLAIIFEKTSDNCSVSTQNIINGKRRTRGCETSFNETQLS
RNIFGMGQINRSRPKATRGQAIHKITEDDVEMKPKKARLEAQEINGVSVTP
DEQQVENNVEVTQKEVEAISSEPLLSSEVEPTRKPRTKPRKNELDKLNDDIA
QMYYGEEVMRATSRRACTRRSRTSSHTRTSSQHSRTSSVSRTDSISTVSDISS
IIVRNTARRGRGIRSSENGINRATFNASLNAKKPKLCRVRIKRCAALMEMIKD
QEKEEQEKKEQKNKEPKKKVGVQKKPLKSKPKRENSVILNTNPEWHSISK
AVIKCVVCSKWVRRSPLSHYMMCHKEHYAARLPPDVLKELRAGRGNRPDY
WVSQRGGYTLHFTCPFCQKPLLLCQKGMIEHLIGHMGESRFYCSNCNMPQN
RLSRLLDHTASCGPGAKPLSSKTVCLPMSVHVCHICQFMQYSKENMDRHLT
VQHGLTKBELESVEREELMLCDTTDVPYADSNKDGSAREREEQDDQNMTQ
ANEGSEVPEIPPPPPEIEPLFVVNECLMTSEMDTDMEEVLEQPVQHMSLMVD
EKPVTLLSGATEQLEPSVPDPEPVVPSAQDDGKDVNEDEDVDVEAVVDSLQ
SHTDQTATSMLAEVSLAELAGDVLDGIGSDASDYEMDDNSEQVDTTNKNG
YGDDDDDALTDDWVDLETAKRNSKSAKSIFRVFNRFCSRLNKLPRSSRAVP
SNGSENSDGSDNNDDDGDNPDPSELMPTMQPLFPEPEMGDSSTSTGAKSLS
ERVENVGFQRPSSDEDQNRVAASYYCVQPGCTFLFSNELEGLENHFALEHP
LVRWSGKCGMCRQKITATETNLRISEELRHMRDVHMKDISTLPPPQSSAVES
PAVIESCLNQREPVPESEPDPVPELPKIRVRPYTGDRLVVDSQAEKSQPVAIV
VSDDDNPRNGMLRDLLAADPRPPNQQLDLQAAGLGEFLCAKPDSPSTEPVK
QTPVIVGYSSGLGLMGQVLSRTQISANSRLSPVVNDPLPEKSSAPAAVEENR
NRFRCMATNCNFVAHKIMFMREHMKFHSYSFSSTGHLNCAYCSHVAVDV
DDYLRHGVIIHDLAPRSELESSTGPPSVTQKIRDMLSQRENGRVPPPTPQVTL
SDVVLGLLBCTGYSEDKLYACPQKGCIVRLTDEQLVNHLRYHIRSTHQGSBL
VKCKFCTKAMHPPALRTHLQQYHARHSIFCGICLATSVNQRIMMYHMSTVH
SKAYGRPNARLAFVSLPVKIDASKKNVESEFYVAVVEQPFGNLQMQDFQRK
LFDEMDRRRSGTKTYFRSSEVHILPTQPTFQRPLYCTECPFSTTSRVNMQMH
LYEHKDETIREASKLADLIVPATSSVLTVSASTLVAPPRPGKDSEKPSTSGQS
GDAATEQLNPDVPGTHRPIRPPLRYVPPDQRYRCGFLRCSVLCFSESAVRKH
MQANHKYSEVVRCPHCKNCQGQFGVDKYFDHLAMHKRHIFQCGACSRHN
SRRVIERHIQERHNIQDVDMIVHRHNDSNKTTEARWLKAPKLARHSLMEYT
CNLCLKYFPTTVQIMAHAASVHKRNYQYHCPYCEFGGNLATALIEHILRELIP
EREVQPVQIYQRIVCKNKQTLGFYCTTCHEVASSFQKIAMHCDKEHKSRNP
VQCPHCIFGHLAERQVVLHIQEKHPHERGLAMVQFERVLNDIPNSISWEIGRP
IEVEPEKEIPNNGESAFLPLSQRQVVTEVVDLLDSDDEADEYGEQDDAKIVEF
ACTHCDGTNTNLPDLRSQHWAREHPDQPFYFRVQPMLLCSECKRFRGNAK
ALREHLRATHSIRSIVAADIRRPMECAYCDYRYKNRHDLAKHISEIGHLPND
LKHVTDDEIDALMLLSASGSGGAVNEYYQCGLCSVVMPTKETIVQHGQVE
HCKPDERFCFRQLVSPVIYHCSFCMFNSTDELTTLRHMVDHYSRFLVCHFCT
RSQPGGFDEYIQHCYTYHRDDIKSFRDVHTFSDLKRYLSQVHYQFQNGLIIT
KSSLRYTRYKSDKCMLELDAELMAKAQRPPIPRLHIRLKSTGVQMQSPEGA
DVEKPVSLLRITKRRKTLNPGELLRSFREENEVQPQPPASSTSSGTAPSPAAG
SVFNLFKZRRNSLVVRPATSNLDQH
Scim11
AE003568 (insertion @237885), nearest ORF (CG1494) @228917 (9 kb away)
>>CG1494|FBgn0031169|cDNA sequence
ATAAGGTGGGACCAGGACCACGGGGTGCTGACCCAAACACCATGGTAC
ATACTGATCTTAGTGCTGTTCTGCTACAACTGCGCCGCCGTTGCCTTTGC
CATAATGGTGGCTGCCTTTTTCCGGAACGCTCTCAACGCCGTTCGGGTGT
TGACAATCCTGTGGATAATGTCCTACGTGCCCACCTTCATTCTGTCGAAC
AACTTGGAGGGCAATATTCACGCCCTGCGCTACGTGTCGTATGCGCTGC
CAAATGTGGTGGCAACTCTGGTGATTGAATTTCTCATCGAACGGGAGTC
GATCGTCCATATCACGTGGGAGGACTCTGGGTACAGACTCAACTATGAC
GGCGGCCACATAACGGTAACCGCGAGCTCCTGGATCTTCATGCTGAATG
CTTTGGTTTACTGTGCAATTGGTCTCTATGTGGACATGTGGCGGGGTGGC
GACCGATCGGGTAAGAAGATGAAGAAACCCAACACGAATGCCAGTGTA
CAAGAAGATCCATACCACGAACGGGGGGACAGTTTCACTCATCAGGGTC
AGGCCATTGGCGTTAACTCAACGAAAATCTATGAGGTGGAACCCTCACA
TCGGCGCTTCAAGCTAAAGATCAAGAAGCTGTGCAAGCGATTTGCGACA
AACGATCGTCCGGCATTAAATCTCTTCTCGTGGAATGTATACGAGAACG
AGGTCACCGTTCTGATGGGTCACAATGGCTGTGGCAAGAGTACACTGCT
CAAAATACTAGCCGGCTTGGTGGAGCCCAGTCGGGGCACTGTGATGATA
TCCAGCCACAATATACAGACCGAAAGGAAGGCGGCCTCAATGGAGCTG
GGCATCGCATTTGGCCATGACATGCTTCTCACCGGCTTCACAGTCATTGA
TTACTTACGATTCATTTGCCGAGTTAAGGGATTGCACAATAACATCGAGA
TCGATGGTCAGTCCAACTACTTTCTTAACGTCCTGCAAATCGGAGGCCTA
AAGACCAAACGAATCCGCACCCTCACTGATCGCGATTTGTGCCTGGTTA
GCATCTGCTGTGCCTTTGTCGGTAATAGTCCCATAATCCTCATAGACGAC
GTTCACTCCGATCTGGACAAGCGCACGCAGTCGCTGGTCTGGAACCTGA
TTAACGAGGAAAAGTCCAAGCGCACCATTATCCTGGTGTCCAACTCGCC
GGCTCTGGCCGAAAACATTGCCGATCGCATGGCCATTATGTCCAACGGG
GAGCTCAAGTGTACCGGAACGAAACCGTFITCTAAAGAATATGTACGGAC
ATGGCTATCGATTGACCTGCGTTAAGGGGAAGAACTACAAAAGGGATGA
ACTGTTCGGCATGATGAACAGCTATATGCCCAACATGAGCATCGAGAGG
GATATTGGGTACAAGGTCACCTTTGTGCTGGAGAACAAGTTCGAGGATC
AGTTCCCTATGCTAATCGATGATCTGGAGGAGAATATGCAGCAGCTGGG
TGTGGTCAGTTTTCGGATTCGGGACACGTCGATGGAGGAAATCTTCCTGC
GATTTGGATGCGAAGACAATGACCAAAGTGGCGCTTTTCAATCGCACGA
AAACGCGCAAGTCCTGCTGGAGGAGTACTATTCCACACTGGCTGAGGCC
AATGAAAAAGGTCGAAGGACTGGCTGGAAGCTGTTTTTTTTGCATGGCA
GGGCGGTGATCTACAAACGTTGGATTGCGGCCCACCGACACTGGATCGT
ATTGATTTTTGAGGTTCTGGCCATGGCCCTGGTCGCGGTGTGCACATTCT
CCAGCATTTTCATCTACGGCAAGAACTATGAGTTGGAACCGCTGACCTTT
AACCTCAGCCAGCTGCACACTGTGGACGCCTTCGTGGAGCTCTTTTCCGA
AGAGGAGGATGTCAAGGATATGCACGCCTATTACACGGAGCTGCTCTAT
TGGTACGACGCTCATGTGGCGACGCTGACAAAAAACCGTCATAACGCAT
ACGCCCTGTTGACCCAAAACCAATTCACCGCCCACGTCAACTCGCGCTA
CATTTTCGGAGCCACGTTCGATCAAAAGATCGTCACCGCCTGGTTTAATA
ATATACCACTGCACTCTGCACCCTATGCCTTGAATGTTGTCCACAATGCG
GTAGCCAGGCACTTGTTCGACGAGGAGGCCACCATTGATGTGACCCTGG
CGCCGCTGCCGTTCCGGACGGCCATTAACACCTTTCCGCCTAGCAGCCAT
ACATTTGGTGGCTGTTTAGCATTTGGCATTTGCTTCGTGCTGACATTTATT
TGGCCAGCATTCGCGATTTACATGATCACCGAGCGTGGAAGCTTGCTGA
AGAAACAACAGTTTTTGGCCGGAGTCAGGGTGTGCAGCTACTGGACGTT
TACGGTGTTATATGACTTGCTCTTCCTGCTGATCTTCTGCGCGTGCGTTGT
GGTCATGGTGGCATTATACGAGAATCCGAACCACGACGTTATGCTATAC
GGTTACATATCGGTCACATTGATGCTGGGAGGATTCTGGGTGATCCTGCT
TGCGTATTTAATGGCGAGCCTGTGCCGGAACCCGTGCTATGGATTTTTGT
GGCTATGCGGGATTAACAGTATCGGCCTCGTCTGCTTCTCGCAATTCTAT
AGAACTCATCCAGAATCTATGCTCCTCGAGCCGACCTTTATGGCCATGTA
CACGGTGGCCACAGTTATATGCAAGCTTTTCATGATCTACGAATTCAAGC
TAATCTGCATGGATCCCGTCGTGAATTTTACCTCCGTCGAGGTATTCAAA
TCGGAGTGCTTGAGCATCACGGGAGCAAACAACTCCGGCAAGACTACGC
TGCTCAAGGTGGTGGTGAATGAGACAAAGATGAACGCTGGACAGCTCTG
GATCCATGACTACTCGGTGAACACCCACCGTGTCCAGTGCTACCGGATG
GTGGGCTACTGTCCGCAAAAAGACAGCCTTCCGTCGGAGTTTACCCCGC
GTGAATTGCTGTACATTCACGCCATGCTTCAGGGCCACAGGCACCGCAT
AGGCCGCGAATTGTCGGAGGCACTGCTCCGTCTGGTGGGACTCACCCCT
TGCTGGAATCGGTCAGTGCGCATGTGCACCACAGGTCAAATCCGGCGAT
TATATTTTGCCTACGCCGTGCTGGGATCCCCGGATCTCATCTGTGTGGAC
GGTGTACCAGCTGGACTGGATCCGACCGGGAAGCGAATCATCCTGATGA
TGACCTCCACCATGCAGGCGATGGGGTCCAGTTTCTTGTACACTATGCTC
ACAGGTCTGGACGCCGAGCGACTGTCCCTGCGCACGCCACTTCTTTTAG
AGGGCCAACTCTGGATGATTCGGCCCATGGACACAGAGACCGAGAACTA
TAAGAGTGGCTACCAGCTGGAGGTACGATTCAAGAGGAAGGTCAATCCT
AATGTCAGCATGTCCCGGGCCACCTGGAACCTAATCAACCACTTTCCCAT
GTCACCAAACAAGAAGTTCAGTGCCTTCATGGAGATCAAGTTTCCCGAT
GCCGTGCTCACAATTGAAAGAGATGACTCGATGGTATTTGTATTGCCGTT
GGGCACGACCACCTTCTCGGAGATATTTCTTACACTGCGCAAAGATGCC
TTCGAAATGAACATAGAGGACTACTTTATCACACGCAACATGCTCGTGG
GCTTCCAGATATITACCTATGATCAACATCAGGACAATCCATAA
>CG1494|FBgn0031169
MVAAFFRNALNAVRVLTILWIMSYVPTFILSNNLEGNIHALRYVSYALPNVV
ATLVIEFLIERESIVHITWEDSGYRLNYDGGHITVTASSWIFMLNALVYCAIGL
YVDMWRGGDRSGKKMKKKNTNASVQEDPYHERGDSFTHQGQAIGVNSTK
IYEVEPSHRRFKLKIKKLCKRFATNDRPALNLFSWNVYENEVTVLMGHNGC
GKSTLLKILAGLVEPSRGTVMISSHNIQTERKAASMELGIAFGHDMLLTGFTV
IDYLRFICRVKGLHNNIEIDGQSNYFLNVLQIGGLKTKRIRTLTDRDLCLVSIC
CAFVGNSPIILIDDVHSDLDKRTQSLVWNLINEEKSKRTIILVSNSPALAENIA
DRMAIMSNGELKCTGTRPFLKNMYGHGYRLTCVKGKNYKRDELFGMMNS
YMPNMSIERDIGYKVTFVLENKFEDQFPMLIDDLEENMQQLGVVSFRIRDTS
MEEIFLRFGCEDNDQSGAFQSHENAQVLLEEYYSTLAEANEKGRRTGWKLF
FLHGRAVIYKRWIAAHRHWIVLIFEVLAMALVAVCTFSSIFIYGKNYELEPLT
FNLSQLHTVDAFVELFSEEEDVKDMHAYYTELLYWYDAHVATLTKNRHNA
YALLTQNQFTAHVNSRYIFGATFDQKIVTAWENNIPLHSAPYALNVVHNAV
ARHLFDEEATIDVTLAPLPFRTAINTFPPSSHTFGGCLAFGICFVLTFIWPAFAI
YMITERGSLLKKQQFLAGVRVCSYWTFTVLYDLLFLLIFCACVVVMVALYE
NPNHDVMLYGYISVTLMLGGFWVILLAYLMASLCRNPCYGFLWLCGINSIG
LVCFSQFYRTHPESMLLEPTFMAMYTVATVICKLFMIYEFKLICMDPVVNFT
SVEVFKSECLSITGANNSGKTTLLKWVNETKMNAGQLWIHDYSVNTHRVQ
CYRMVGYCPQKDSLPSEFTPRELLYIHAMLQGHRHRIGRELSEALLRLVGLT
PCWNRSVRMCTTGQIRRLYFAYAVLGSPDLICVDGVPAGLDPTGKRIILMM
TSTMQAMGSSFLYTMLTGLDAERLSLRTPLLLEGQLWMIRPMDTETENYKS
GYQLEVRFKRKVNPNVSMSRATWNLINHFPMSPNKKFSAFMEIKFPDAVLTI
ERDDSMVFVLPLGTTTFSEIFLTLRKDAFEMNIEDYFITRNMLVGFQIFTYDQ
HQDNP
Scim12¹
Scim12²
Scim12³
Scim12⁴
Scim12⁵
Scim12⁶
Scim12⁷
Scim12⁸
AE003582 (insertion @76200), nearest ORF (CG9894) @72208.
>>CG9894|FBgn0031453|cDNA sequence
CAGTGTGTTTGTGTGCTTCGTTCGGTGCGGTTCTCTCTGTCTCTCTCTCGC
CTTCCCCGAGTATTTTGCGCTGGTTTTTTGTCAACAACAAGACAATCCAC
AAAACCAACCCGAATTGTTCTCTATATAACGCAGAAACTAAATAGTTCC
GGAAAACCTCAAAGAAACCAATTCAAATATGTCGGCTGCTACGGAACAA
CAGAACAACGGCGATGTGGCCGTGGAGAAGGTGGCGGCAGATGATGTG
TCTGCTGTCAAGGACGATCTCAAGGCGAAGGCGGCCGCCGAGGATAAG
GCCGCTGCTGCCGATGCCGCCGGCGACGCGGCCGACAACGGTACGTCAA
AGGACGGCGAGGATGCCGCCGATGCCGCCGCCGCTGCCCCCGCAAAGG
AATCCGTGAAAGGCACCAAGAGGCCAGCAGAAGCCAAATCCGCAGAAT
CAAAGAAGGCCAAGAAGGCCGCGGCCGCCGATGGAGATTCCGATGAGG
AAGAGGCTCTGGAGGAAATCATCGAGGGCGACAGTGAAATCGAGAGCG
ACGAGTACGACATCCCCTACGATGGTGAGGAGGATGACATTGAATGTGA
TGATGATGATGATGATAATGATGACGGTTCCGGCTCGGACGATCAGGCG
TAATAATAATGTAGTCAAAAATACAAACAAAAACAAACAAAAATTTAA
ATTAATAATAAATAAAAGTTACAAGCAAAAAAAAAAAAAAAAC
>CG9894|FBgn0031453
MSAATEQQNNGDVAVEKVAADDVSAVKDDLKAKAAAEDKAAAADAAGD
AADNGTSKDGEDAADAAAAAPAKESVKGTKRPAEAKSAESKKAKKAAAA
DGDSDEEEALEEIIEGDSEIESDEYDIPYDGEEDDIECDDDDDDNDDGSGSDD
QA
Scim13¹
Scim13²
AE003582 (insertion @96627), nearest ORF (within CG9892) @89868
>>CG9892|FBgn0031449|cDNA sequence
TACATATATATTCTTGGCCAGAGATATACATGGTATATATGGTCTCGGTT
CTTCTGCGCGCGTGTTACAAATCAAAAAGTTTGCATATTflTCGAAATTA
TAAATAAAATCGTTCGTTTCATCGTTTCAATCGCCGGTCAACAATCGAGT
GCCAGCTGTGTTTTTTTGCCACTTCGAGAACGATTCCAGAGTGCTTTTCG
CCAAATTTGATATGTGTAAATAATGTGCGAGCAGAGCCAATAAATATAT
TCCGATAAGCTTCCGAAATAAATCAGCGTTCAAACGTTTAAACGTTTTGT
AAACAGCACGGTGGAACACCAAGAGTACACACAAAATGGATAGCAGCA
AGTTGTTGAAGAATGTCTACGGCATCGACATTCACTTCGAAGATCTCGTC
TACCAGGTCAACGTACCCAAAAAGCCAGAGAAGAAGTCCGTGCTGAAG
GGCATCAAGGGTACGTTCAAGTCGGGCGAACTGACCGCCATAATGGGCC
CCTCGGGGGCGGGCAAATCTAGTCTTATGAACATCCTCACCGGTCTGAC
CAAATCCGGCGTCAGCGGGAAGATCGAGATCGGGAAGGCGCGCAAACT
GTGCGGCTACATTATGCAGGACGATCACTTCTTTCCCTACTTCACCGTCG
AGGAGACCATGCTGATGGCGGCCACACTTAAAATCTCCAATCAGTGCGT
CAGTCTGAAGGAAAAGCGAACTCTGATCGACTATCTGCTGAACTCGCTG
AAGCTGACGAAGACGCGGCAGACGAAGTGCTCCAACCTGAGTGGCGGC
CAGAAGAAGCGCCTATCCATCGCCCTGGAACTGATAGACAATCCAGCTG
TGCTATTTTTAGACGAGCCCACAACCGGATTGGACAGCTCCTCCTCCTTC
GACACCATCCAGCTGCTGCGCGGCCTGGCCAACGAGGGACGTACCATCG
TGTGCACCATCCACCAGCCGTCGACGAACATCTACAATCTCTTTAACCTG
GTCTACGTGCTAAGCGCGGGTCGATGCACCTACCAGGGCACGCCCCAGA
ACACGGTCATGTTTCTCAGCAGCGTGGGCCTGGAGTGCCCGCCCTACCA
CAATCCCGCCGACTTCCTGCTGGAATGCGCGAACGGGGACTACGGCGAT
CAGACGGAGGCTCTGGCGGAAGCGGCCAAGGACATACGCTGGAGATAC
GATCAGCAGTTGATGCAGGGCGAGGATGCCGATGCGCCCAGCGAGACG
CAGGTGGCCAAGTTCAATGAATCTCAGTCACCGGGGCAGGTCCAGGTGC
AGGTGCAGAAGATCGAGATCCAGAACATGGAGTCGTCGAAGGATCTGA
CCAAGCACACCTATCCGCCCACGGAATACATGCGACTGTGGCTGCTCAT
CGGCCGGTGTCATCTTCAGTTCTTCAGGGATTGGACTCTTACCTACCTGA
AGCTGGGCATTCATGTGCTCTGTTCCATTTTGATTGGCTTGTTCTTCGGCG
ATTCGGGCAGCAATGCCACCAAGCAAATTTCCAATGTCGGCATGATCAT
GATCCATTGCGTATATCTCTGGTACACCACCATTATGCCGGGCATATTGA
GATATCCCGCCGAAATAGAGATCATCAGAAAGGAGACCTTCAACAACTG
GTACAAATTGCGAACCTATTACCTTGCCACCATCATCACATCCACACCAG
TCCATATCATCTTCTCGACGGTGTATATAACGATAGGATATCTGATGACC
GATCAGCCCGTGGAAATGGATCGATTTGTTAAGTACCTACTAAGTGCGG
TGGTGGTCACGATCTGTGCGGATGGTCTGGGCGTCTTTCTGGGCACCGTG
CTGAATCCAGTGAATGGAACTTTCGTTGGCGCCGTTTCGACGTCATGTAT
GCTAATGTTCTCCGGCTTCCTCATCCTGCTGAATCACATTCCGGCTGCCA
TGCGATTCATGGCCTATATATCGCCACTTCGCTACGCCCTCGAAAACATG
GTGATCTCGCTGTACGGCAATCAGCGTGGCCAGTTGATCTGCCCGCCCA
CGGAGTTCTATTGCCACTTCAAGAACGCTGTGACTGTGCTGCGACAATTT
GGTATGGAGGACGGCGACTTTGGTCACAACATTCTCATGATCCTCATCC
AAATAGCGATATTCAAGGTTCTGTCCTACTTTACGCTGAAGCACAAGAT
CAAGACGAACTGA
>CG9892|FBgn0031449
MDSSKLLKNVYGIDIHFEDLVYQVNVPKKPEKKSVLKGIKGTFKSGELTAIM
GPSGAGKSSLMNILTGLTKSGVSGKIEIGKARKLCGYIMQDDHFFPYFTVEET
MLMAATLKISNQCVSLKEKRTLIDYLLNSLKLTKTRQTKCSNLSGGQKKRLS
IALELIDNPAVLFLDEPTTGLDSSSSFDTIQLLRGLANEGRTIVCTIHQPSTNIY
NLFNLVYVLSAGRCTYQGTPQNTVMFLSSVGLECPPYHNPADFLLECANGD
YGDQTEALAEAAKDIRWRYDQQLMQGEDADAPSETQVAKFNESQSPGQVQ
VQVQKIEIQNMESSKDLTKHTYPPTEYMRLWLLIGRCHLQFFRDWTLTYLK
LGIHVLCSILIGLFFGDSGSNATKQISNVGMIMIHCVYLWYTTIMPGILIYPAE
IEIIRKETFNNWYKLRTYYLATIITSTPVHIIFSTVYITIGYLMTDQPVEMDRFV
KYLLSAVVVTICADGLGVFLGTVLNPVNGTFVGAVSTSCMLMFSGFLILLNH
IPAAMRFMAYISPLRYALENMVISLYGNQRGQLICPPTEFYCHFKNAVTVLR
QFGMEDGDFGHNILMILIQIAIFKVLSYFTLKHKIKTN
Scim14¹
Scim14²
AE003618 (insertion @24110), nearest ORF (CG13791) @25704
>>CG13791|FBgn0031923|cDNA sequence
ATGAGTTCCTACAGGACATTGGTGGATCATGGCCATCCGATTATAGTGG
GAAGCAGTGAAATATCGCTGGCCCCGAGTTCGGCAGCCAGTTCGCCCAA
GCCCCTACACCGGATGATCAAGTACTGGCGCAACAGTTCCGGATAAAAATT
CCGGGTCTCCGCAAAAGCGAGAGTTTCGCCGAGTATCGTCGCCATTCAT
CCAACTCGGCCACAATTTCGGGAGGATCAGGGGGCAGATCGAGCACTTC
GAGTGCCAGGCAATTGCAATACCAGCGACTGGAGATGGAAAGCTGCGA
GAATATAGATATGCTGACAGAACCACTAAGGTAA
>CG13791|FBgn0031923
MSSYRTLVDHGHPIIVGSSEISLAPSSAASSPKPLHRMIKYWRNSSGKIPGLRK
SESFAEYRRHSSNSATISGGSGGRSSTSSARQLQYQRLEMESCENIDMLTEPL
R
Scim15¹
Scim15²
AE003626 (insertion @73500), nearest ORF (CG4026) @73530
>>CG4026|FBgn0032147|cDNA sequence
AGCCGCTAGACCACGTAACGCCACGATTTTCGCCGGATCCACCGATTCG
ATTCGATTCGCCGCGATCGTCAGTGCCTATATATACAGTTCCCAACGGAG
CCGAGCGATAAAGATAAATGTGCAAAAACAAAGCGCACTTAGATAAAG
ATAGCGAAGTTCTCCCATGTGGAAGGCACAGTGCAAGTGAAGTGAAACG
AGAACGCAGTTTTGAATAGGAAATACGAAAGTACTCACATATATAGAGA
ACCCGAGACTTGGAGTCAGAATGCAAATGTGGCGAGCATAAAGTCGCAA
AGCGTGAAAATCTACGATATATACGAGTATAGTCGATTCCAAGTGTCAG
CCAAGTGAAACCCAGTGTGCAGCCGAAACCAAACCGAATGACTATGACT
TCTACGGTGCTCCAACGGCCCATTCAAGCCAAGCCAGAGAAGAAGGCCT
CCTCCAAATCGACCAGCTCCTCGAGAAGCCGCTCCACGATGGCCTGGTC
CAATGAGAAGCTGCGCTTCTCCTGCATCGACAACATCGGACTCAAGCAG
CTATGGAAGCTGATTGCCCTGGACACGAGTGCTTCATCCAAGCAGCGCA
GTGCCATGATGTTGGAAGTGGAGCAACAGCAGCAACAGCAGCAGCAGC
AGCAATCGAACAACAATAACGAGCGGATACCCAACGAGAACTGCGACT
ATTTGAGTCTACAGAGATCGGGCCAGGCGCCGAAGAATCACATCCAGGC
GCAGGATCCGGCTCAGATGTCCCTGCTCAAGTTFCTTGGCCATTGTAAGTA
CCCCATGTTGTTAG
>CG4026|FBgn0032147
MTMTSTVLQRPIQAKPEKKASSKSTSSSRSRSTMAWSNEKLRFSCIDNIGLK
QLWKLIALDTSASSKQRSAMMLEVEQQQQQQQQQQSNNNNERIPNENCDY
LSLQRSGQAPKNHIQAQDPAQMSLLKFLAIVSTPCC
Scim16
AE003628 (insertion @237450), between two ORF (CG13143 @234496 and
CG6187 @240204)
>>CG13143|FBgn0032255|cDNA sequence
ATGCAGAATTCTCCGGCTCCGTGTGCCTGGTACTTGCCCTGGTCCCTGGC
CGCCCAGCAGCACCAGCAAAAGATGCTGCAAATGCAGTCGCCGTTTCTG
GACAAGATGGGCGCCACATCGGTGGGCGGCATCTTCGCTGGCCAGCCGC
AGATGCAGCAACAATTGTCGCCCAATACGGCAGCAGCACCGCCGGCAA
ACTATCAGCAGCCCGCTTTGCATCCAAGCGCCGCACCAGGCGCACCACA
CTTCCACATGGGATCCCCGTATAGCCATCTGGCACCGCAGCTCCTCAACG
CCGGACAGCTGAACCAGAACGCACTGATGCACTCCGCCATGTTCTCTTC
CCTGCCACTTGGTGCGTACTATGCACCCGCCGCCGGCGCAGGTCACTCG
GCCTTTGGTGGCGTTCCCCTGACCACGGCTGCCCAGCAATCTCTATTGGC
CGCCACCGGAGGAGCAACTGCTGGCCATTTGGCCAACCAGCAGACGACG
GCTCAAGTGCCCGTCCAGGTGCCCGTGCAAATGGCCCAACGGACAGCTC
CGGCCGCCTGCTCCATGGTCCAGCCACTTAACTGCCTGCCGCACCAGGA
ACTGAATCACCTGTCGTCCATCAATCTCAACCTGCTGCGCAGTCCGGCGC
CTCCGCTCCCAGCCATTCAGGTCTTGCCAAGTGCCGAGGTGCCGATTAAT
AAGAAGGTGAGTTGCAGTTTGCTTAGTACTTGTAATGATAGGCACTATTC
GTACTTGAGCGAAGGCTAG
>CG13143|FBgn0032255
MQNSPAPCAWYLPWSLAAQQHQQRMLQMQSPFLDKMGATSVGGIFAGQP
QMQQQLSPNTAAAPPANYQQPALHPSAAPGAPHFHMGSPYSHLAPQLLNA
GQLNQNALMHSAMFSSLPLGAYYAPAAGAGHSAFGGVPLTTAAQQSLLAA
TGGATAGHLANQQTTAQVPVQVPVQMAQRTAPAACSMVQPLNCLPHQEL
NHLSSINLNLLRSPAPPLPAIQVLPSAEVPINKKVSCSLLSTCNDRHYSYLSEG
>>CG6187|FBgn0032256|cDNA sequence
TTTCGGCATAAAAACGTAATTTTCATGCGGTTTTTGCGGCAATTTAGGGA
CGTTTTTCGTTTGGCAAGTGGTGTTTGTGTTATGAATTAAAGTAACATTT
AACTCATTCAATTGAATCATCGCATAAAGCAGAGTGTTTTTGTGTTTGAA
ACTGAAATCTGCGCACGTGTTGACTAACTTGTTGTTATTATTATAGCGTT
GCTTAGATATTCTAGTAAATTGGCCGCAAATCAAAAACTATAAACAATT
CTCGTGGCTGTTGAAAATGGAGAGTTCCAAACTCTTGAGAAATGCACAA
ACCCAGCATGGAGATGCCTCATCCGTGGACGTGGAAAACATATTCCTGC
ACCGCCATATGCTATACACAAATCCCACTTCGGATGGCAATCTCCATGAT
CGGGAAGATTCCCCCGAATGCGTGTGGTGTCCAGACGACAAGGATGGTA
GTCCAGCTGAAAGCAAAGATCCACCGGTGTGGACGGATTGGAAATGTGC
CATCAAGAGCATGTGGAAACAGAAACATGAGCCAATGAAGGCGACGGA
AGAAGAGCATGTCATTATCCTCCAGTTGGATAAGTTCCAAGATGCTGAT
CCGGATGAAATCAGGGTGTATCAAGAAGCAGTACCCAAGGGAATATCCA
TATCAGAGGAAAAGTCTGAAACGCAATCAAAAGAAGTTTTGTCGGAAAA
GCGAAAAGCTAGCAGCACAGATGACGAAGGGCATGTGAAAAAAGTAAA
ATTAGAGGCCAATAGTCTAAAAACGAAGCGTCCTGGATTCAGCGATGAA
AGATACGACGAAACATCGTATTATTTTGAGAATGGTCTGCGGAAGGTGT
ATCCTTATTTTTTCACATTCACCACGTTCGCCAAAGGACGTTGGGTTGAT
GAGAAAATTCTGGATGTATTTGTCCGCGAATTTCGAGCCGCACCGCCGG
AGGAATATGAACGCAGCCTGGAAGCGGGAAAATTGACTGTTAACTCTGA
GAAAGTGCCCAAGGACTATAAAATCAAGCACAATGATCTGCTGGCCAAT
GTGGTGCATAGACACGAAGTCCCTGTTACTTCACAGCCCATCAAGATTG
TGTACATGGACAAGGATATTGTGGTTGTGAATAAGCCGGCATCGATACC
GGTACATCCTTGTGGAAGATATAGACACAACACGGTAGTTTTCATCCTG
GCCAAGGAGCACAATCTGAAGAACCTGCGAACCATTCACAGATTGGATC
GTCTCACATCTGGCCTACTTTTGTTTGGACGGACTGCTGAAAAAGCCCGC
GAATTGGAGCTGCAAATCCGAACTCGCCAAGTGCAAAAGGAATACGTTT
GCCGCGTTGAAGGACGCTTTCCAGATGGCATAGTTGAATGCAATGAGAA
AATCGACGTCGTGAGCTACAAAATAGGTGTTTGTAAGGTTTCACCGAAG
GGCAAGGACTGTAAGACCACATTTAAAAGAATCGGCGAGGTGGGCAGT
GATAGTATTGTTTTGTGCAAACCACTAACAGGACGAATGCACCAAATAC
GAGTGCATTTACAATTCTTGGGCTATCCCATTTCAAATGATCCTTTGTAC
AACCATGAAGTTTTCGGTCCATTGAAAGGAAGAGGAGGAGATATCGGTG
GAATAACCGAGGAACAGTTGATCAGTAACCTAATTAGCATTCATAATGC
AGAAAACTGGTTGGGCTTGGAAGGAGATCAAATCGTATCAGGGGAAAT
AAAAGACGTAGCAGCAAGTACTTCAGTAGTAGAGGCTCCCTCAGTAGTT
CAGGCTCCTATTAATAGTGAAACTGAAAAGCCTGTGATTTCAAAAAACC
TTGAACCAAGTAACGATACAACTTCGGATCCGCAATGTTCTGAATGCAA
GATAAACTACAGAGACCCCGGCACAAAGGATCTCATAATGTACTTGCAT
GCATGGAAATACAAGGTCAGTTTCAAACTATACATTTTTAAAGATTTAAT
TTCAAATTAAATCTTATTTTCAGGGCGTTGGTTGGGA
>CG6187|FBgn0032256
MESSKLLRNAQTQHGDASSVDVENIFLHRHMLYTNPTSDGNLHDREDSPEC
VWCPDDKDGSPAESKDPPVWTDWKCAIKSMWKQKHEPMKATEEEHVIILQ
LDKFQDADPDEIRVYQEAVPKGISISEEKSETQSKEVLSEKRKASSTDDEGHV
KKVKLEANSLKTKRPGFSDERYDETSYYFENGLRKVYPYFFTFTFfFAKGRW
VDEKILDVFVREFRAAPPEEYERSLEAGKLTVNSEKVPKDYKIKHNDLLANV
VHRHEVPVTSQPIKIVYMDKDIVVVNRPASIPVHPCGRYRHNTVVFILAKEH
NLKNLRTIHRLDRLTSGLLLFGRTAEKARELELQIRTRQVQKEYVCRVEGRF
PDGIVECNEKIDVVSYKIGVCKVSPKGKDCKTTFKRIGEVGSDSIVLCKPLTG
RMLIQIRVHLQFLGYPISNDPLYNHEVFGPLKGRGGDIGGITEEQLISNLISIHN
AENWLGLEGDQIVSGEIKDVAASTSVVEAPSVVQAPINSETEKPVISKNLEPS
NDTTSDPQCSECKINYRDPGTKDLIMYLHAWKYKVSFKLYIFKDLISN
Scim17
AE003634 (insertion @146760), nearest ORF (CG17745) @142269 (4 kb away)
>>CG17745|FBgn0032386|cDNA sequence
ATGGCTCCCAAGATCGTCGAGATCTCCGCTCCTCCGGCCAACCATTCAG
ACCCAAGATATATGAGCCAGTGCTATGTTGTGACTGCTGCCCGCTGTGC
ACCTGTGCCCAGGGATGTGGACGTGGATGTGAATGTGGACGAGGATGTG
GATGAGGAGATGAGCCTGGCTAAAAACCGAGCAGATGAGCAGGCGAAA
TGGACTTTTAAATGTTGCCATTTGTTGCGTGAAAACGCAACCGGTAGCCA
AAAAACGTTCAGCATTGCGATTTCTTGGGCTGCGGAGGGTTTCGGAATT
GCCACGTTTCCCGGGATTGCCTCTGATCTTGGACTGTGGGCTCCACTCAG
CTATTAG
>CG17745|FBgn0032386
MAPKIVEISAPPANHSDPRYMSQCYVVTAARCAPVPRDVDVDVNVDEDVD
EEMSLAKNRADEQAKWTFKCCHLLRENATGSQKTFSIAISWAAEGFGIATFP
GIASDLGLWAPLSY
Scim18
AE003666 (insertion @157060), nearest ORF (CG16798) @152043
>>CG16798|FBgn0032856|cDNA sequence
GTTCTTGTGTCGGAACATTCGGTACCAAAACTTCGGACGCTGCGGCTTTC
GTACTATTTATGATTTTTTGTGTTGTGACAAATGCGATTTATTTGCGGAC
AAAAGTGGCTTTTGGCAATCAGCTGGTATTGTTCTGCGAGAGCCGTACC
AAATAGTGCATAACATAAAATAAAACAAAACGAGTACTGGAAAAAAAA
AAGTATCTAAAGTCAAACATTTGGGTCCCCTGGCAACACTTGCATTTTCC
CTCACGACCAATCGCCCAATATAACTCCCGGCTGACACACATTTGATGA
GAACAAACAGCAAACTTAAAAAAATCTACCGAAAATAATGTCAACGAA
ATCAATGGCAGCCCACGGCAGCTGCAACATGTTGCTGCTGTGTCTTCTGC
TCCTGCTGCCGTCGGTCTCCCCCGTCCGCTTGCCCAAAAGCAGCAGCAA
CAATGCAACAGCAGCAACAACAGCAGCGACCGCATCAACCGAATCAAC
CGCAACAGCAGCAACAACTGCTGCAATCCGCAATGCCAATGCCAAGGCT
GGTAGCAAATATGAGATACGCGGCGTTGCCGGTGAACCAAATTACAAAT
CGGTGAATCTGACCTGGGAAGTTGAATTCGTGCCGTCGGCCCATGACAC
AGATTCGAGCCCCAACTCCAACTCCAGAGCGGACCAGGTGAACGCGACA
AATATGAGCGGCGATGTGGAACCGCCCCGGGATCTGGCATTCCAGATAT
TCTACTGTGAGATGCAGAACTACGGCCCACAGCGGTGTCGCGTCAAATT
GGTGAATGGCACCACCGCCGAGGTGTCCCAGGAGGAGAATGAGAAGGC
GACGGATCAGCAGGAGAAGCATGAACCCTCAGGGTCCCAGGTGCACCA
CTTTGTTGCTGCCGTGGACAACTTGCGCATGGCCACCAAATACAGTTTCC
ACGTTCGCCCGGCTGCTCAGAAGCGCCTCCAGGCGGGCGGAACTCGCAG
CTCCAATGCCCGGGCAGACTTTCACGATGAAAACAACGAGATCGAGAGT
GGATCCGGACATCTGGCGGGCCAGAGCATCGTCATACCCACCAAGGGCT
TCACCGCACATGCCACCCAGTGTTTGCCGCATGCCTCAGAGATCGAGGT
GGAGACGGGTCCGTACTTCGGAGGACGCATCGTCGTGGATGGAGGAAAC
TGTGGGATCAAGGGCGATGCCAGCGATGCGGCGGACAAGTACACGATG
AGGATCGATCACAAAGAGTGTGGAAGCTTGGTGAAACCGGAGACCAAC
ACGGTGGAGACCTTCATCACGGTACAGGAAAACCTTGGCATATTTACCC
ACAGCACAAGACGCTTTGTGGTGGTCTGCAGCTACCACTCAGGCATGCA
GACGGTCCGAGCAAGCTTCACTGTACCTGGAAAGAACGGGGTGGCCGCC
GCCTACGAGCCCAACGACCCCTTTGAGCCAGACGAGGATCAACGCCTGG
GCAGGGAACTCCGACCGATGCGCTACGTCAACAAGACGGAGCTGGTGCT
TCGCGAACCGGACTCCCAGCGGGAGTCCCAATCCGATTCGGAGTCCGTG
GAACAGGCTGCGGTGGTGGAACAGGCCCCGACGCCCACCACCGAGCAG
GCTTCTCAGCCCAGAGGTCAGGGCAGAGCTCTGAACCTCAACGAGGTCA
ACAGTTTGGCCGATGAGCCGGCGGAGGAACATCACTTGGAGCCTGTGGT
GGGCACCAAGTACGCCAAACTGGTTGTCGACCAGAGCCACAGTTCCTGG
ATGCCGTTGGAGGTGGGCTCGCCATCAGGTGGTAGCGACGAGAATGAAG
CCGTTCTGCGTTATATTGGCTCCCATCTTAGCAGCGTGCTGGTAACCGTC
TCGCTATCTGTGATAATCATCAGCATTITGCATCGTTCTGCTGCAGCGCCA
GCGGATCCGCTCTCCGCCCCGCAGCCCATCCCCCTGCCTGGCCGCCCACC
TGCCGCACAAAACGTTGCCGCGTGCACTGCAGCAGCAGCAGTACCAGTG
CACCTTGTAG
>CG16798|FBgn0032856
MAAHGSCNMLLLCLLLLLPSVSPVRLPKSSSNNATAATTAATASTESTATAA
TTAAIRNANAIKAGSKYEIRGVAGEPNYKSVNLTWEVEFVPSAHDTDSSPNS
NSRADQVNATNMSGDVEPPRDLAFQIFYCEMQNYGPQRCRVKLVNGTTAE
VSQEENEKATDQQEKHEPSGSQVHHFVAAVDNLRMATKYSFHVRPAAQKR
LQAGGTRSSNARADFHDENNEIESGSGHLAGQSIVIPTKGFTAHATQCLPHA
SEIEVETGPYFGGRIVVDGGNCGIKGDASDAADKYTMRIDHKECGSLVKPET
NTVETFITVQENLGIFTHSTRRFVVVCSYHSGMQTVRASFTVPGKNGVAAA
YEPNDPFEPDEDQRLGRELRPMRYVNKTELVLREPDSQRESQSDSESVEQA
AVVEQAPTPTTEQASQPRGQGRALNLNEVNSLADEPAEEHHLEPVVGTKYA
KLVVDQSHSSWMPLEVGSPSGGSDENEAVLRYIGSHLSSVLVTVSLSVIIISIC
IVLLQRQRIRSPPRSPSPCLAAHLPHKTLPRALQQQQYQCTL
Scim19
AE003669 (insertion @167790), nearest ORF (CG9241) @168642, CG9242 spans
this region also.
>>CG9241|FBgn0032929|cDNA sequence
AGCCCGCCAAAACAGATATGTTATTGCGCTTATTTAGAAAACCAAGAAA
AAACACGAGAACACGTGAAAATACAAATCTACCCAAATGAAATGGGTC
CTGCTCAGAAATCCGGAACAGATATTAGTATCGATGATGAGGAGGAAAT
ACTGGCTCTGGAAAAACTACTGGGTGCAGCAGAAAACGAAAATACAAA
ATCTGCAGAGTCAGAAAAAGCAAAACCCACCGCACCCATTTGGTGCCA
AAACTACGAGAAGACAACAGTTTTGCTAATGCCTTCACCTTCGAGAAGA
TCGTGAAACCGGAAAAGCAGAAGAATGCTGCTATCATTAAGGAACCAG
AGCTGGACTCGTCCGACGACGAGGAGGTAAAGAACTTCCTGGAACGAA
AGTACAATGAGTACGGCAGTGATATAAACAAGAGACTGAAGCAGCAGC
AGGAGAACGCCTACGAGTCCAAGGTGGCGAGGGAGGTGGATCAGGAGC
TTAAGAAGTCTATCCACGTGGTTACATCCACCCCGCAACCCCTGAAAAA
TCCGCATAATCCTATTAAACGGCAATCGGCGGTGAGCACCACGTTTCAA
CGTCCTCCGCCAGTCGCTGCCGCCGTGGCATCTACATCCCAGTCAAGTGC
TCCCGTATCTGCTGTTTTTACGGATCCAGTCTTCGGACTGCGCATGATCA
ATCCGCTAGTCTCCAGCTCACTGCTGCAGGAGCGCATGACGGGCAGGAA
ACCTGTGCCCTTCTCAGGCGTTGCGTATCACATCGAGCGAGGCGATTTGG
CCAAAGATTGGGTCATTGCTGGCGCGCTGGTTTCCAAAAATCCTGTAAA
AAACACCAAGAAGGGTGATCCCTACTCCACGTGGAAACTATCCGATCTA
CGGGGAGAGGTTAAAACGATCTCACTTTTCCTTTTTAAAGAGGCCCACA
AATCCCTGTGGAAAACAGCGGAGGGTCTGTGCTTGGCTGTGTTGAATCC
AACTATTTTCGAGAGGAGAGCGGGAAGCTCCGATGTGGCCTGCCTATCC
ATCGATAGCTCCCAGAAAGTCATGATCCTGGGTCAATCCAAAGATTTGG
GCACATGTCGGGCCACCAAAAAAAATGGGGACAAGTGCACTTCGGTGGT
TAACCTAACCGACTGTGAYATTGCATTTTTCATGTAAAGCAGGAATATG
GCAAGATGTCCCGACGTTCTGAACTGCAATCGGCGACCGCAGGTCGTGG
TATCAATGAACTAAGAAACAAGGTTTTGGGCAAAAACGAGGTATTTTAC
GGCGGCCAAACATTTACTGCAGTTCCCGCAAGAAAAAGTGCCAAGTTAA
TCACCAAGGAACGTGATCGTCTGAGTATGCTGGCTGGCTATGATGTTTCC
CCCTTCGCCCATACCGCTAACCACACCTCAAAGCCCAAAACAGCCGAAC
CCACTAAAATTCCATATGCAGAACGTGGCGGTCCTGTTTCCCGTTTGGCT
GGTGGTGTGGAAGCGTCTAGGAAACAGAGAGTCCAAGATCTAGAGCGG
TTGCGTCTGCTTAAAGAGGAAAATGAGCGCTTTGAAAAAAAGAAGCAGG
CGGAGGGCCATGTCTTGGGAAGTGATAACAAAAAAGAATCTGAAGCAG
GCACACCCGCTGTCAGTATGCCCACTACACCTGTTCCAGATAAATTCAA
AAATCGAGGCTTCTCCTTTGATGCCAGTTTAACGCCCAAGCTTTCCGGTA
GCGAGAACTTTTCCTTTGAAATCAATGTAGGATCTCGCCAGGCACAAAA
TGCTAAGCTGAAAGCAGCTGCCCTGCTGAAGAAGAAGCCACTGGAGAA
GATCAACCCCAACTCCACACGAGGCAGTGAAAGTGGGAAGAGAAGAGC
CATCGATGAACTCAACGAGAAGTTCTCTAGCAGCGCCAAGCGACAAAAA
ATTGATGAGGACGATCGGGAGTTAATGCGCAAATCAAGAATCGAAAAA
ATAATGGCAGCCACCTCATCGCATACGAATCTCGTGGAAATGCGAGAGC
GCGAAGCGCAGGAAGAGTACTTTAACAAGCTTGAACGCAAGGAAGCGA
TGGAAGAGAAGATGCTGACCACATACAAGATGCCATGCAAGGCCGTCAT
CTGCCAGGTGTGCAAGTACACAGCCTTTTCCGCTTCCGATCGCTGCAAGG
AGCAGAAGCACCCCTTAAAGGTGGTCGATGCTGAAAAGCGATTCTTTCA
GTGCAAAGACTGCGGAAATCGAACTACTACCGTATTCAAGUGCCCAAA
CAGAGCTGTAAGAATTGCAAGGGGTCGCGATGGCAAAGGACGGCTATG
ATACGGGAGAAAAAGATACTGACTGGTAGAGAAACTCTATCCGTGAGA
GGAGACGAGGAAACCTTTATGGGCTGCCTAGCAGGCAGTGCTAATCTCA
ACTTGCTGGTACCCGATGAAGAGTGA
>CG9241|FBgn0032929
MINPLVSSSLLQERMTGRKPVPFSGVAYHIERGDLAKDWVIAGALVSKNPV
KNTKKGDPYSTWKLSDLRGEVKTISLFLFKEAHKSLWKTAEGLCLAVLNPTI
FERRAGSSDVACLSIDSSQKVMILGQSKDLGTCRATKKNGDKCTSVVNLTD
CDYCIFHVKQEYGKMSRRSELQSATAGRGINELRNKVLGKNEVFYGGQTFT
AVPARKSAKLITKERDRLSMLAGYDVSPFAHTANHTSKPKTAEPTMPYAER
GGPVSRLAGGVEASRKQRVQDLERLRLLKEENERFEKKKQAEGHVLGSDN
KKESEAGTPAVSMPTTPVPDKFKNRGFSFDASLTPKLSGSENFSFEINVGSRQ
AQNAKLKAAALLKKKPLEKTNPNSTRGSESGKRRAIDELNEKFSSSARRQKI
DEDDRELMRKSRIEKIMAATSSHTNLVEMREREAQEEYFNKLERKEAMEEK
MLTTYKMPCKAVICQVCKYTAFSASDRCKEQKHPLKVVDAEKRFFQCKDC
GNRTTTVFKLPKQSCKNCKGSRWQRTAMIREKKILTGRETLSVRGDEETFM
GCLAGSANLNLLVPDEE
>>CG9242|FBgn0032928|cDNA sequence
ATATGGTCATCCGCTCGTCAATAAGTCATCTTTCGGCTTTAATTCGCGAA
AAAACTGCAGGAAATCCAAAAGGAAAGTCCCTGGAAGCGGCCATAATA
ACGCAGCCGTGAAAATCACAGGGATTTCATCGCCAGCTGTGTCGAGCAG
CCCTGGATACGCGGAAAAGAAGCTGCAGCAGCCGAAGTTTTGAGTG
TGTGCGTGAGGAAGGAAAACGGGGGACCGCAAACAACGGATCGCGAAT
TTCGTCTTAAGACAAAGTCTTGCGCTGCTTGTCACGGTATTCCACGGCCT
TGCCGACGGACTTCCCGGTTCTGGAAAACCGCAGCCAGGCTAAAACGAG
AGAAGTGCTGCAACGATAAAGAAATGAACTCAAACATTTTTCTGGGCAC
AGCAGAGAATGGCCTGCGGCATGATAAGATTGTTATACTTGATGCGGGA
GCACAGTACGGCAAGGTTATCGACCGTAAGGTACGCGAACTCTTCGTTG
AGACGGATATCCTTCCTCTGGATACGCCAGCTGCCACGATACGCAACAA
TGGCTATCGAGGCATCATCATCTCCGGCGGACCCAACTCAGTCTACGCT
GAGGATGCGCCCAGCTATGATCCCGATCTGTTCAAGCTAAAAATACCTA
TGCTGGGCATCTGCTACGGCATGCAGCTAATCAACAAAGAGTTCGGGGG
CACAGTGCTCAAGAAGGATGTTCGAGAGGATGGCCAACAAAATATCGA
GATCGAGACCTCGTGCCCGCTCTTTAGTCGCCTCAGTCGCACACAGTCCG
TGCTGTTAACCCACGGAGATAGCGTTGAGAGGGTAGGCGAGAATCTGAA
GATTGGTGGCTGGTCTACAAACCGCATTGTGACAGCCATTTACAATGAA
GTACTACGCATCTACGGCGTACAGTTCCATCCTGAGGTGGACCTCACTAT
CAATGGCAAACAGATGCTATCGAACTTCCTGTACGAAATCTGCGAACTG
ACACCTAACTTTACCATGGGTAGTCGAAAGGAGGAGTGCATACGCTATA
TCCGTGAGAAAGTGGGCAACAATAAGGTGTTGCTCCTGGTCAGCGGCGG
CGTGGATTCGAGTGTCTGTGCAGCTTTGCTCCGCCGTGCTTTGTACCCTC
ATCAGATAATTGCCGTGCATGTAGATAATGGTTTCATGCGCAAGAAGGA
AAGTGAAAAGGTGGAGCGTTCACTGCGCGATATTGGCATTGATTTAATC
GTCCGAAAAGAAGGCTACACGTTCCTTAAAGGCACCACGCAGGTCAAGA
GGCCCGGACAGTACTCCGTGGTGGAAACGCCGATGTTATGTCAGACATA
CAATCCGGAGGAAAAACGCAAGATAATTGGTGATATATTCGTCAAGGTG
ACCAATGATGTAGTAGCCGAATTGAAACTAAAGCCCGAAGAAGTTATGT
TGGCCCAGGGAACCCTCCGACCAGATCTGATCGAGTCCGCCTCTAGCAT
GGTGAGCACGAATGCAGAAACAATCAAAACGCACCACAATGACACGGA
TCTGATCAGAGAGCTTCGTAACGCAGGACGTGTGGTTGAGCCCCTTTGC
GACTTTCATAAGGATGAAGTGCGCGACCTTGGCAATGATCTTGGCCTGC
CTCAAGAGCTTGTGGAGAGGCAACCCTTTCCGGGTCCTGGCCTGGCAAT
CCGCGTCCTTTGCGCTGAGGAGGCATACATGGAAAAGGACTACTCAGAA
ACTCAGGTTATTATCCGCGTGATTGTAGACTACAAGAATAAACTGCAGA
AGAACCATGCTTFGATCAACCGCGTAACGGCGGCCACGAGCGAGGCGG
AACAGAAAGACCTTATGCGTATCTCATCGAACTCGCAGATCCAGGCAAC
TTTGCTGCCCATCCGATCAGTGGGCGTGCAAGGTGATAAACGGTCATAT
AGCTACGTAGTAGGCCTATCCACGAGCCAGGAGCCCAACTGGCAGGATC
TTCTCTTCCTCGCCAAAATCATACCGCGAATTCTGCACAACGTGAACAGG
GTGTGCTATATCTTCGGCGAACCCGTACAGTATCTAGTGACGGATATTAC
GCACACCACACTGAATACTGTAGTTCTTTCGCAGCTGAGGCAAGCCGAT
GATATTGCCAATGAAATCATAATGCAAGCTGGACTATACCGGAAGATCT
CGCAGATGCCTGTTGTTCTCATACCCGTGCACTTTGACCGCGATCCCATT
AACCGCACACCCTCGTGCAGAAGGTCGGTAGTGCTGCGTCCGTTCATAA
CGAACGACTTTATGACTGGTGTGCCGGCTGAGCCCGGATCCGTGCAAAT
GCCTTTGCAAGTCCTAAATCAAATTGTACGCGATATATCCAAGCTGGAT
GGAATCTCGAGGGTGCTGTACGACTTGACAGCCAAGCCGCCGGGCACCA
CCGAATGGGAATGA
>CG9242|FBgn0032928
MNSNIFLGTAENGLRHDKIVILDAGAQYGKVIDRKVRELFVETDILPLDTPAA
TIRNNGYRGIIISGGPNSVYAEDAPSYDPDLFKLMPMLGICYGMQLINKEFGG
TVLKKDVREDGQQNIEIETSCPLFSRLSRTQSVLLTHGDSVERVGENLMGG
WSTNRIVTAIYNEVLRIYGVQFHPEVDLTINGKQMLSNFLYELCELTPNFTMG
SRKEECIRYIREKVGNNKVLLLVSGGVDSSVCAALLRRALYPHQIIAVHVDN
GFMRKKESEKVERSLRDIGIDLIVRKEGYTFLKGTTQVKRPGQYSVVETPML
CQTYNPEEKRKIIGDIFVKVTNDVVAELKLKPEEVMLAQGTLRPDLIESASS
MVSTNAETIKTHHNDIDLIRELRNAGRVVEPLCDFHKDEVRDLGNDLGLPQ
ELVERQPFPGPGLAIRVLCAEEAYMEKDYSETQVIIRVIVDYKNKLQKHALI
NRVTAATSEAEQKDLMRISSNSQIQATLLPIRSVGVQGDKRSYSYVVGLSTS
QEPNWQDLLFLAMIPRILHNVNRVCYIFGEPVQYLVTDITHTTLNTVVLSQL
RQADDIANEIIMQAGLYRMSQMPVVLIPVHFDRDPINRTPSCRRSVVLRPFIT
NDFMTGVPAEPGSVQMPLQVLNQIVRDISKLDGISRVLYDLTAKPPGTTEWE
Scim20 (the 3′and 5′P element sequences are separated by ˜24 kb)
3′Search AE003784 (insertion @11445), nearest ORF (CG12110) positioned from 1392
to 14629
5′Search AE003784 (insertion @36320), three ORFs are in this region
CG8276 3′end 1 kb away, CG8330 3′end 6 kb away, CG8325 5′end 6 kb away
>>CG12110|FBgn0033075|cDNA sequence
TITTGCTAGGCGTGGAGTAAGATGAACGCGAACAGAAACTTTTGAATTT
TGAAGTAAAATTTAAATTTAAGTGAAAGTGTTAAGTCTGCCATACGAAA
GCATTTAAATGAAGTAATACATATGTATAAATGTACATATATACACTTAA
CCCACTGCTGAGGTCTCCAGCTTTCAGTGCCAGTTTGGAGTCCACGACGG
AGAAGTTAAGCCACAACTTCTGGCATCAGATTAAGAGCTAAACCTATTT
CAGCAGTAGCCGCAAGCATTTGAACACCCCACTGACGATGATACCGGC
CGGCGCACTATGGCGGCTACGTTAACAGAGGCTACGATGATTTAGACAG
TTCCTACTACTTTGCCCAGTACGAGGCGATGGCAGATGCCGGCACCGTT
GGAGGCGCCTTGCCGCCCTACGCACTTACCAACTCGGACGAAGAACATG
GCAGCGGGGAAGAGGACGCGTCGGAGGAGAACTCCAACAATGAAGAGG
GAGAGGGAGTGTTCCGGGACTGCACAGACGAAGCGGTTGTCGAGCATCA
TAACCGCTGCCTGCCAGAATTTCAGTTCTCTCTAGTCGATTCTGAGTACG
ATGAGACCCTCGCTTTTCCTGATTCTGTGACCATTCTATCCAACGTGGGC
GACAAGCCGGTGCTGGTGGAGCGCAAGGAGACGGACGATGATGAGGAG
GAGTTCGACGACGAGGAAAACAACAGTGTAGTCCTGAGACACGAAATA
CCATTTACTAGCATATACGGGGCGAGCGTCAAGTTCAACTCGTTCCAGC
GCAAGGTTTTCATCCCGGGCCGTGAGATTCATGTTCGGATCGTCGATACG
GAGCGTAGCGTCACTACACATCTGCTAAACCCCAATCTGTACACAATCG
AGCTGACCCACGGTCCCTTCAAGTGGACGATCAAGCGGCGATACAAGCA
CTTTAACTCGTTGCACCAGCAGCTCAGCTTTTTCCGCACCTCGCTCAACA
TTCCTTTTCCCAGTCGCAGTCACAAGGAGAAGCGTACCACTTTGAAAGC
CACAGCCAGAGAGATGGCTGACGAGTCCACTCTAAAGGACCTTCCTTCT
CACACCAAGGTCAAACAAACTAGCACTCCGCTGAGGGCTGAAGGCAGA
AGCAGTAAAATCGCGGGCAGTAACGCCAACAATGCCATGGCTATGATCA
GTCCCAATCACAGCTCCATTCTGGCGGGTCTAACACCACGACGCATTCA
AAAGAAGCGCAAAAAAAAGAAGAAACGGAAGCTGCCGCGATTCCCAAA
CCGTCCTGAGAGTCTGGTCACCGTAGAGAATCTGAGCGTCAGAATAAAA
CAGCTGGAGGACTACTTGTACAACCTGCTGAACATCAGCTTGTACCGAT
CTCACCATGAAACGCTAAACTTCGTTGAAGTGTCTAATGTGTCCTTTGTT
CCGGGAATGGGAATTAAGGGCAAGGAAGGCGTGATTTTAAAGCGAACT
GGATCAACGAGACCAGGGCAAGCAGGATGCAATTTTTTTGGGTGCTTTC
AAAAGAACTGCTGTGTGCGCTGCAACTACTTTTGCTCCGACGTAGTTTGC
GGCACGTGGCGGAACCGATGGTTTTTCGTAAAAGAGACCTGCTTCGGCT
ACATCCGTCCAACAGACGGAAGCATCCGGGCAGTGATCCTCTTTGATCA
GGGCTTCGACGTTTCCACGGGTATCTATCAGACGGGCATGCGCAAGGGC
TTGCAGGTACTGACGAACAACCGTCACATTGTGCTCAAGTGCTGGACAC
GGCGTAAGTGTAAAGAGTGGATGCAATACCTCAAGAACACGGCCAACTC
GTATGCGCGCGACTTCACCCTGCCCAATCCGCACATGTCCTTCGCTCCGA
TGCGCGCCAACACTCATGCCACGTGTCCCGAGATATACATGAAGCGACC
CGCACTCGACGGAGACTACTGGCGATTGGACAAGATCCTGTTGCGCAAG
GCCGAACAGGGAGTGCGCGTCTTTGTGCTGCTCTACAAGGAGGTTGAAA
TGGCACTTGGCATAAACAGCTACTACAGCAAGTCCACGCTGGCCAAGCA
TGAAAACATCAAGGTCATGCGTCATCCGGACCATGCTAGAGGAGGTATT
CTGCTTTGGGCACATCACGAAAAGATCGTCGTAATCGACCAAACCTATG
CGTTTATGGGAGGTATTGATTTGTGCTATGGACGTTGGGATGATCACCAC
CATCGGCTAACGGATCTGGGTAGCATATCTACGTCATCTTTTTCTGGCAG
CACGCGTCGAACGCCAAGTTTGTACTTCACCAAAGACGACACGGACTCA
GCTTTCGGATCACGTAAGTCCTCGCGAAACGCTCACTACGATACCTCCGC
CAAGGAAAGGCCACCGTCCCCACCCCCGGATGAGCCCAATACTAGCATA
GAGTTGAAAACTCTTAAGCCTGGTGATCGACTGCTTATACCGTCTACGCT
CGTTTCGAGTCCGGGTGAAACTCCCGCAGAATCGGGAATCGCTTTAGAA
GGGATGAAACTCAACACCCCTGAAATGGAGCGTAAGAACGTACTCGATC
GCCTGAAGAACAACGCGATGAAGGGCGCCCGTATGGGCAAGGACTTTAT
GCACCGTCTAACAGCTACTGAGACGGAGGAAAAATCTGCGGAGGTGTAC
ACTATCGAGTCCGAGGAAGCTACGGACCACGAAGTCAACCTTAACATGG
CTTCAGGTGGGCAGGAAGTGGCGATTACCACTAGCAGTACACAAATACT
CAGTGAGTTCTGCGGCCAGGCCAAGTACTGGTTCGGCAAGGATTACTCC
AACTTTATACTTAAAGACTGGATGAACCTAAACTCGCCGTTCGTGGATAT
CATAGATCGAACAACAACACCGCGGATGCCATGGCACGACGTGGGTCTG
TGTGTGGTGGGTACTTCCGCTAGGGATGTGGCCCGCCACTTCATTCAGCG
CTGGAATGCCATGAAGCTGGAGAAACTACGCGATAACACGAGATTCCCC
TATTTGATGCCAAAAAGCTATCACCAAGTGAGGCTCAATCCGAACATTC
AGCAAAACCGTCAGCAACGGGTCACGTGCCAGCTACTTGGAAGCGTCTC
TGCCTGGAGCTGCGGCTTTATAGAGGCGGATCTTGTGGAGCAAAGCATC
CACGATGCCTACATCCAGACGATCACCAAGGCGCAGCACTACGTGTACA
TCGAAAACCAATTTTTTATCACTATGCAGTTAGGCATGGGTGTGCCAGGT
GCTTATAACAATGTGCGGAATCAAATCGGGGAAACACTCTTTAAACGGA
TCGTTAGAGCGCACAAGTATGAAACCAAAATACTTATCCTGATTCTAGC
AGATCTAATGTTCAGCTCTTCTAGGGAACGGAAGCCTTTCCGAGTTTATG
TGATFTATGCCGCTCCTACCGGGCTTTGAGGGTGATGTCGGTGGCAGTACT
GGGATAGCAGTCAGAGCAATTACACACTGGAACTATGCGTCCATTTCCA
GGGGACGCACATCAATTTTGACCCGCCTGCAGGAGGCGGGTATTGCCAA
TCCGGAAAACTATATCTCATTCCACAGCCTGCGCAACCATTCTTTTTTGA
ATAACACACCCATAACAGAGTTGATATATGTCCACTCAAAGCTCTTGAT
AGCCGACGATCGCGTTGTAATCTGCGGTTCGGCAAACATTAACGATCGC
TCTATGATCGGAAAGCGGGACTCCGAGATAGCGGCTATTCTAATGGACG
AGGAGTTCGAGGACGGACGCATGAATGGCAAGAAGTATCCGAGCGGAG
TGTTTGCCGGTCGCCTTCGAAAATACCTTTTTAAAGAACACTTAGGCCTC
CTGGAAAGCGAAGGTTCCAGTCGGTCTGACCTGGACATTAACGATCCTG
TTTGTGAGAAGTTTTTGGCACGGCACCTGGCGTAGGATTTCAATGCAGAA
CACAGAGATTTACGACGAGGTGTTTAAGTGCATCCCCACTGACTTTGTA
AAAACCTTTGCCAGCCTTCGCAAATACCAGGAGGAGCCGCCTCTTGCCA
AAACCGCCCCTGATCTAGCTGCCAACAGAGCCAACGACATTCAGGGTTA
CTTGGTCGACCTGCCATTGGAATTTCTGAACAAGGAGGTTCTCACGCCGC
CTGGAACTAGTAAGGAGGGCCTAATCCCTACCTCTGTATGGACATAGTC
TGTCAAAAGTGTCTAAGATTTTAGAAAGCTTAAAAACCACTTACCATTTA
CCACCCACCAAAAGCACTATCTTTAACGATGCCAATGTCAAGTCAAACA
TTTTGTAAATAGTGTATAATAGCCGTAGATAACTCTAGATACTTTCAAGT
ACATGTAGCTATTCCTTACCAATAGTTAATTTATTTTACAATGTTTGTCTA
TGTCCTCAAGTAGTTTTAAGATTTTTGTTATTATTTTGTATGATGTTAAAC
AGTATTTTAGACCGATTTACACAAGTTTATTAAAGTGATATGAAGTGCAA
ATGAAGAACTGCAACAT
>>CG12110|FBgn0033075|cDNA sequence
CGTGGAGTAAGATGAACGCGAACAGAAACTTTTGAATTTTGAAGTAAAA
TTTAAATTTAAGTGAAAGGTTCGAAGTAATTGTTAATTGAAAAATAAAT
CAAATGCAGTTTAGCCTGATCTGAGGAAAGAAAGAACGAGTGCTAAGCT
CAATGAACTTTCACTCTCCGCTCTCTCCCTATACATCGCGCTTCCAGCGA
GAAATCTCTGCTGATCGTTCTCATTTCCACGTTCGCTTGGCGTTTTGATCA
GTTTCGAATTTGACTTATAGCGACGCTGGTCGGAGCTCTCTCGGCAAACA
AAAACCGTGACAAGCAAAGATTTGAGCAAAGATTTGCCCAGAAGGGGT
CTTGCTCGACACCAATAATAAAAATGCCGCGATAGAAGTGTGTGTGCCA
TTGACCAACATTTTAATATTTTTAAATTGTTTCTTGTGTGCTCACGAAACG
TGTTCATGTGGCGCCTCAATTGATTTGATCTTATTTCACCAATTATCAAA
GTGTTAAGTCTGCCATACGAAAGCATTTAAATGAAGTAATACATATGTA
TAAATGTACATATATACACTTAACCCACTGCTGAGGTCTCCAGCTTTCAG
TGCCAGTTTGGAGTCCACGACGGAGAAGTTAAGCCACAACTCTGGCAT
CAGATTAAGAGCTAAACCTATTTCAGCAGTAGCCGCAAGCATTTGAACA
CCCCACTGACGATGTTTACCGGCCGGCGCACTATGGCGGCTACGTTAAC
AGAGGCTACGATGATTTAGACAGTTCCTACTACTTTGCCCAGTACGAGG
CGATGGCAGATGCCGGCACCGTTGGAGGCGCCTTGCCGCCCTACGCACT
TACCAACTCGGACGAAGAACATGGCAGCGGGGAAGAGGACGCGTCGGA
GGAGAACTCCAACAATGAAGAGGGAGAGGGAGTGTTCCGGGACTGCAC
AGACGAAGCGGTTGTCGAGCATCATAACCGCTGCCTGCCAGAATTCAG
TTCTCTCTAGTCGATTCTGAGTACGATGAGACCCTCGCTTTTCCTGATTCT
GTGACCATTCTATCCAACGTGGGCGACAAGCCGGTGCTGGTGGAGCGCA
AGGAGACGGACGATGATGAGGAGGAGTTCGACGACGAGGAAAACAACA
GTGTAGTCCTGAGACACGAAATACCATTTACTAGCATATACGGGCCGAG
CGTCAAGTTCAACTCGTTCCAGCGCAAGGTTTITCATCCCGGGCCGTGAG
ATTCATGTTCGGATCGTCGATACGGAGCGTAGCGTCACTACACATCTGCT
AAACCCCAATCTAGATTTACGACGAGGTGTTTAAGTGCATCCCCACTGA
CTTTGTAAAAACCTTTGCCAGCCTTCGCAAATACCAGGAGGAGCCGCCT
CTTGCCAAAACCGCCCCTGATCTAGCTGCCAACAGAGCCAACGACATTC
AGGTACTCTTCCCAATTAATATTTAA
>>CG12110|FBgn0033075|cDNA sequence
CTAGGCGTGGAGTAAGATGAACGCGAACAGAAACTTTTGAATTTTGAAG
TAAAATTTAAATTTTAAGTGAAAGCTTTCAGTGCCAGTTTGGAGTCCACGA
CGGAGAAGTTAAGCCACAACTTCTGGCATCAGATTAAGAGCTAAACCTA
TTTCAGCAGTAGCCGCAAGCATGTGAGTGCTTTAAATTCATAAAAACAC
ATTAAATTGAACACCCCACTGACGATGTTTACCGGCCGGCGCACTATGG
CGGCTACGTTAACAGAGGCTACGATGATTTAGACAGTTCCTACTACTTTG
CCCAGTACGAGGCGATGGCAGATGCCGGCACCGTTGGAGGCGCCTTGCC
GCCCTACGCACTTACCAACTCGGACGAAGAACATGGCAGCGGGGAAGA
GGACGCGTCGGAGGAGAACTCCAACAATGAAGAGGGAGAGGGAGTGTT
CCGGGACTGCACAGACGAAGCGGTTGTCGAGCATCATAACCGCTGCCTG
CCAGAATTTCAGTTCTCTCTAGTCGATTCTGAGTACGATGAGACCCTCGC
TTTTCCTGATTCTGTGACCATTCTATCCAACGTGGGCGACAAGCCGGTGC
TGGTGGAGCGCAAGGAGACGGACGATGATGAGGAGGAGTTCGACGACG
AGGAAAACAACAGTGTAGTCCTGAGACACGAAATACCATTTACTAGCAT
ATACGGGCCGAGCGTCAAGTTCAACTCGTTCCAGCGCAAGGTTTTCATC
CCGGGCCGTGAGATTCATGTTCGGATCGTCGATACGGAGCGTAGCGTCA
CTACACATCTGCTAAACCCCAATCTGTACACAATCGAGCTGACCCACGG
TCCCTTCAAGTGGACGATCAAGCGGCGATACAAGCACTTTAACTCGTTG
CACCAGCAGCTCAGCTTTTTCCGCACCTCGCTCAACATTCCTTTTTCCCAG
TCGCAGTCACAAGGAGAAGCGTACCACTTTGAAAGCCACAGCCAGAGA
GATGGCTGACGAGTCCACTCTAAAGGACCTTCCTTCTCACACCAAGGTC
AAACAAACTAGCACTCCGCTGAGGGCTGAAGGCAGAAGCAGTAAAATC
GCGGGCAGTAACGCCAACAATGCCATGGCTATGATCAGTCCCAATCACA
GCTCCATTCTGGCGGGTCTAACACCACGACGCATTCAAAAGAAGCGCAA
AAAAAAGAAGAAACGGAAGCTGCCGCGATTCCCAAACCGTCCTGAGAG
TCTGGTCACCGTAGAGAATCTGAGCGTCAGAATAAAACAGCTGGAGGAC
TACTTGTACAACCTGCTGAACATCAGCTTGTACCGATCTCACCATGAAAC
GCTAAACTTCGTTGAAGTGTCTAATGTGTCCITTGTTCCGGGAATGGGAA
TTAAGGGCAAGGAAGGCGTGATTTTAAAGCGAACTGGATCAACGAGACC
AGGGCAAGCAGGATGCAATTTTTTTGGGTGCTTTCAAAAGAACTGCTGT
GTGCGCTGCAACTACTTTTGCTCCGACGTAGTTTGCGGCACGTGGCGGA
ACCGATGGTTTTTCGTAAAAGAGACCTGCTTCGGCTACATCCGTCCAACA
GACGGAAGCATCCGGGCAGTGATCCTCTTTGATCAGGGCTTCGACGTTT
CCACGGGTATCTATCAGACGGGCATGCGCAAGGGCTTGCAGGTACTGAC
GAACAACCGTCACATTGTGCTCAAGTGCTGGACACGGCGTAAGTGTAAA
GAGTGGATGCAATACCTCAAGAACACGGCCAACTCGTATGCGCGCGACT
TCACCCTGCCCAATCCGCACATGTCCTTCGCTCCGATGCGCGCCAACACT
CATGCCACGTGTCCCGAGATATACATGAAGCGACCCGCACTCGACGGAG
ACTACTGGCGATTGGACAAGATCCTGTTGCGCAAGGCCGAACAGGGAGT
GCGCGTCTTTGTGCTGCTCTACAAGGAGGTTGAAATGGCACTTGGCATA
AACAGCTACTACAGCAAGTCCACGCTGGCCAAGCATGAAAACATCAAG
GTCATGCGTCATCCGGACCATGCTAGAGGAGGTATTCTGCTTTGGGCAC
ATCACGAAAAGATCGTCGTAATCGACCAAACCTATGCGTTTATGGGAGG
TATTGATTTGTGCTATGGACGTTGGGATGATCACCACCATCGGCTAACGG
ATCTGGGTAGCATATCTACGTCATCTTTTTCTGGCAGCACGCGTCGAACG
CCAAGTTTGTACTTCACCAAAGACGACACGGACTCAGCTTFTCGGATCAC
GTAAGTCCTCGCGAAACGCTCACTACGATACCTCCGCCAAGGAAAGGCC
ACCGTCCCCACCCCCGGATGAGCCCAATACTAGCATAGAGTTGAAAACT
CTTAAGCCTGGTGATCGACTGCTTATACCGTCTACGCTCGTTTCGAGTCC
GGGTGAAACTCCCGCAGAATCGGGAATCGCTTTAGAAGGGATGAAACTC
AACACCCCTGAAATGGAGCGTAAGAACGTACTCGATCGCCTGAAGAACA
ACGCGATGAAGGGCGCCCGTATGGGCAAGGACTTTATGCACCGTCTAAC
AGCTACTGAGACGGAGGAAAAATCTGCGGAGGTGTACACTATCGAGTCC
GAGGAAGCTACGGACCACGAAGTCAACCTTAACATGGCTTCAGGTGGGC
AGGAAGTGGCGATTACCACTAGCAGTACACAAATACTCAGTGAGTTCTG
CGGCCAGGCCAAGTACTGGTTCGGCAAGGATTACTCCAACTTTATACTT
AAAGACTGGATGAACCTAAACTCGCCGTTCGTGGATATCATAGATCGAA
CAACAACACCGCGGATGCCATGGCACGACGTGGGTCTGTGTGTGGTGGG
TACTTCCGCTAGGGATGTGGCCCGCCACTTCATTCAGCGCTGGAATGCCA
TGAAGCTGGAGAAACTACGCGATAACACGAGATTCCCCTATTTGATGCC
AAAAAGCTATCACCAAGTGAGGCTCAATCCGAACATTCAGCAAAACCGT
CAGCAACGGGTCACGTGCCAGCTACTTCGAAGCGTCTCTGCCTGGAGCT
GCGGCTTTATAGAGGCGGATCTTGTGGAGCAAAGCATCCACGATGCCTA
CATCCAGACGATCACCAAGGCGCAGCACTACGTGTACATCGAAAACCAA
TTTTTTATCACTATGCAGTTAGGCATGGGTGTGCCAGGTGCTTATAACAA
TGTGCGGAATCAAATCGGGGAAACACTCTTTAAACGGATCGTTAGAGCG
CACAAGTATGAAACCAAAATACTTATCCTGATTCTAGCAGATCTAATGTT
CAGCTCTTCTAGGGAACGGAAGCCTTTCCGAGTTTATGTGATTATGCCGC
TCCTACCGGGCTTTGAGGGTGATGTCGGTGGCAGTACTGGGATAGCAGT
CAGAGCAATTACACACTGGAACTATGCGTCCATTTCCAGGGGACGCACA
TCAATTTTGACCCGCCTGCAGGAGGCGGGTATTGCCAATCCGGAAAACT
ATATCTCATTCCACAGCCTGCGCAACCATTCTTTTTTGAATAACACACCC
ATAACAGAGTTGATATATGTCCACTCAAAGCTCTTGATAGCCGACGATC
GCGTTGTAATCTGCGGTTCGGCAAACATTAACGATCGCTCTATGATCGG
AAAGCGGGACTCCGAGATAGCGGCTATTCTAATGGACGAGGAGTTCGAG
GACGGACGCATGAATGGCAAGAAGTATCCGAGCGGAGTGTTTGCCGGTC
GCCTTCGAAAATACCTTTTTAAAGAACACTTAGGCCTCCTGGAAAGCGA
AGGTTCCAGTCGGTCTGACCTGGACATTAACGATCCTGTTTGTGAGAAGT
TTTGGCACGGCACCTGGCGTAGGATTTCAATGCAGAACACAGAGATTTA
CGACGAGGTGTTTAAGTGCATCCCCACTGACTTTGTAAAAACCTTTGCCA
GCCTTCGCAAATACCAGGAGGAGCCGCCTCTTGCCAAAACCGCCCCTGA
TCTAGCTGCCAACAGAGCCAACGACATTCAGGGTTACTTGGTCGACCTG
CCATTGGAATTTCTGAACAAGGAGGTTCTCACGCCGCCTGGAACTAGTA
AGGAGGGCCTAATCCCTACCTCTGTATGGACATAGTCTGTCAAAAGTGT
CTAAGATTTTAGAAAGCTTAAAAACCACTTACCATTTACCACCCACCAA
AAGCACTATCTTTAACGATGCCAATGTCAAGTCAAACATTTTGTAAATAG
TGTATAATAGCCGTAGATAACTCTAGATACTTTCAAGTACATGTAGCTAT
TCCTTACCAATAGTTAATTTATTTTACAATGTTTGTCTATGTCCTCAAGTA
GTTTTTAAGATTTTTGTTATTATTTTGTATGATGTTAAACAGTATTTTAGAC
CGATTTACACAAGTTTATTAAAGTGATATGAAGTGCAAATGAAGAACTG
CAACAT
>CG12110|FBgn0033075
MADAGTVGGALPPYALTNSDEEHGSGEEDASEENSNNEEGEGVFRDCTDE
AVVEHHNRCLPEFQFSLVDSEYDETLAFPDSVTILSNVGDKPVLVERKTDD
DEEEFDDEENNSVVLRHEIPFTSIYGPSVKFNSFQRKVFIPGREIHVRIVDTER
SVTTHLLNPNLYTIELTHGPFKWTIKRRYKHFNSLHQQLSFFRTSLNIPFPSRS
HKEKRTTLKATAREMADESTLKDLPSHTKVKQTSTPLRAEGRSSKIAGSNA
NNAMAMISPNHSSILAGLTPRRLQKKRKKKKKRKLPRFPNRPESLVTVENLS
VRIKQLEDYLYNLLNISLYRSHHETLNFVEVSNVSFVPGMGIKGKEGVILKRT
GSTRPGQAGCNFFGCFQKNCCVRCNYFCSDVVCGTWRNRWFFVKETCFGY
IRPTDGSIRAVILFDQGFDVSTGIYQTGMRKGLQVLTNNRHIVLKCWTRRKC
KEWMQYLKNTANSYARDFTLPNPHMSFAPMRANTHATCPEIYMKRPALDG
DYWRLDKILLRKAEQGVRVFVLLYKEVEMALGINSYYSKSTLAKHENIKVM
RHPDHARGGILLWAHHEKIVVIDQTYAFMGGIDLCYGRWDDHHHRLTDLG
SISTSSFSGSTRRTPSLYFTKDDTDSAFGSRKSSRNAHYDTSAKERPPSPPPDE
PNTSIELKTLKPGDRLLIPSTLVSSPGETPAESGIALEGMKLNTPEMERKNVLD
RLKNNAMKGARMGKDFMHRLTATETEEKSAEVYTIESEEATDHEVNLNMA
SGGQEVAITTSSTQILSEFCGQAKYWFGKDYSNFILKDWMNLNSPFVDIIDRT
TTPRMPWHDVGLCVVGTSARDVARHFIQRWNAMKLEKLRDNTRFPYLMP
KSYHQVRLNPNIQQNRQQRVTCQLLRSVSAWSCGFIEADLVEQSIHDAYIQT
ITKAQHYVYIENQFFITMQLGMGVPGAYNNVRNQIGETLFKRIVRAHKYETK
ILILILADLMFSSSRERKPFRVYVIMPLLPGFEGDVGGSTGIAVRAITHWNYAS
ISRGRTSILTRLQEAGIANPENYISFHSLRNHSFLNNTPITELIYVHSKLLIADDR
VVICGSANNDRSMIGRRDSEIAAILMDEEFEDGRMNGKKYPSGVFAGRLRK
YLFKLHLGLLESEGSSRSDLDINDPVCEKFWHGTWRRISMQNTEIYDEVFKCI
PTDFVKTFASLRKYQEEPPLAKTAPDLAANRANDIQGYLVDLPLEFLNKEVL
TPPGTSKFGLIPTSVWT
>CG12110|FBgn0033075
MADAGTVGGALPPYALTNSDEEHGSGEEDASEENSNNEEGEGVFRDCTDE
AVVEHHNRCLPEFQFSLVDSEYDETLAFPDSVTILSNVGDKPVLVERKTDD
DEEEFDDEENNSVVLRHEIPFTSIYGPSVKFNSFQRKVFIPGREIHVRIVDTER
SVTTHLLNPNLDLRRGV
>CG12110|FBgn0033075
MADAGTVGGALPPYALTNSDEEHGSGEEDASEENSNNEEGEGVFRDCTDE
AVVEHHNRCLPEFQFSLVDSEYDETLAFPDSVTILSNVGDKPVLVERKETDD
DEEEFDDEENNSVVLRHEIPFTSIYGPSVKFNSFQRKVFIPGREIHVRIVDTER
SVTTHLLNPNLYTIELTHGPFKWTIKRRYKHFNSLHQQLSFFRTSLNIPFPSRS
HKEKRTTLKATAREMADESTLKDLPSHTKVKQTSTPLRAEGRSSKIAGSNA
NNAMAMISPNHSSILAGLTPRRIQKKRKKKKKRKLPRFPNRPESLVTWNLS
VRIKQLEDYLYNLLNISLYRSHHETLNFVEVSNVSFVPGMGIKEGVILKRT
GSTRPGQAGCNFFGCFQKNCCVRCNYFCSDVVCGTWRNRWFFVKETCFGY
IRPTDGSIRAVILFDQGFDVSTGIYQTGMRKGLQVLTNNRHIVLKCWTRRKC
KEWMQYLKNTANSYARDFTLPNPHMSFAPMRANTHATCPEIYMKRPALDG
DYWRLDKILLRKAEQGVRVFVLLYKEVEMALGINSYYSKSTLAKHENKVM
RHPDHARGGILLWAHHEKIVVIDQTYAFMGGIDLCYGRWDDHHHRLTDLG
SISTSSFSGSTRRTPSLYFTKDDTDSAFGSRKSSRNAHYDTSAKERPPSPPPDE
PNTSIELKTLKPGDRLLIPSTLVSSPGETPAESGIALEGMKLNTPEMERKNVLD
RLKNNAMKGARMGKDFMHRLTATETEEKSAEVYTIESEEATDHEVNLNMA
SGGQEVAITTSSTQILSEFCGQAKYWFGKDYSNFILKDWMNLNSPFVDIIDRT
TTPRMPWIIDVGLCVVGTSARDVARHFIQRWNAMKLEKLRDNTRFPYLMP
KSYHQVRLNPNIQQNRQQRVTCQLLRSVSAWSCGFIEADLVEQSIHDAYIQT
ITKAQHYVYIENQFFITMQLGMGVPGAYNNVRNQIGETLFKRIVRAHKYETK
ILILILADLMFSSSRERKPFRVYVIMPLLPGFEGDVGGSTGIAVRAITHWNYAS
ISRGRTSILTRLQEAGIANPENYISFHSLRNHSFLNNTPITELIYVHSLLIADDR
VVICGSANINDRSMIGKRDSEIAAILMDEEFEDGRMNGKKYPSGVFAGRLRK
YLFKEHLGLLESEGSSRSDLDINDPVCEKFWHGTWRRISMQNTEIYDEVFKCI
PTDFVKTFASLRKYQEEPPLAKTAPDLAANRANDIQGYLVDLPLEFLNKEVL
TPPGTSKEGLIPTSVWT
>>bin3|FBgn0033073|cDNA sequence
ATTCGGACTTCAAGCAAGAGTCCGCTTTGCCGAGATATAAAATTAATAA
CGAGATCGAGTACCAGCTGCACACAGTGGAAATGAGAAAAGACCGACG
GCAAAACAATAGAACACCCGATTAGTCGTGCGTAACCGATTGACTAA
AGCACGGGGCAGAGTCGATAGAAAAAATATACAGTTTTAAAGCGCTTAA
TTAGGTGTTTTCTAACGTTGGTACATCTCAACGGAGTGGATAACGAGAA
GAGTGAAGGGAGGAGAACCATTGGCAAGAACATACTCACCAAAATGGA
TAATTTCGATAAAATATTTAACAGTGAAAGTGAAAACGGTTGAAGTTTT
AAAATAAAAAGAAATAACTCGTACGCCAAAGAATGCAATATTAAGTGC
AGCCTTGGGTTAATGCCTATCAGGCATTTTACATTGACTGCCATTCGAGC
GTATTAATTGAAAATCTTATGAGGGAGCAAGGCTCTCGAGTAAGTTTAT
AAACTGTGTCCGAAGTAGCATTAAATATCAAAAAGTGAAAATACAAGAC
AAATATTTGAAAAGTGTGCCTGCATAAAACTGAATTAAAAGTAAGGGCC
GATTGCTCTTTAAAAAATAGGGTTAGTCTATGGCGTGCATTCACTAGAGA
AATATGGAAAAGCGGCTTAGCGACAGTCCCGGAGATTGTCGCGTAACGA
GATCCACCATGACGCCCACTCTGCGCCTGGATCAGACTTCCAGGCAAGA
GCCTCTGCCCCAGCAGCCGGATAATGGCCCAGCTGCAGCGCCTGGAAAG
TCTAAGTCCCCCACTCCGTTGCCCGGAAAATCACAGGCCGCCCAGCATC
ACCAGTTCCGCGCTCCGCAGCAGCAGCAGGGCCCGAAAAACCGGAACA
AGGCCTGGATCTACGGGCTCCTCGGTCATAGCCGCGACTCTCCTTCCCAC
TGCGGCGTCGGCTCACAAGGCGGATCTCGAGAACATCCAGAATATCCAT
AACAAAAATCTGACTGCCGGCGGTGGAGTCAACCATCATGGGAACGCCG
GAACAGCGCATCACGGCGGTGGCGGTGGTGCCGGCGCCCATCATGCCGC
AGCGGGTGGCCACCATCACCATCACAACACTAGGCTGGCGCAAAACGCT
GCCGCTGGTGGAGCCAGCGGAGGAGGAACCATTCAAATGCATAAGAAA
ATGTTGAGAGGTCACCATCACCACGTGCTGTGCGCCGGAAACAATGCTA
ACCACACGTGCTGCCTGGTGACGGGATGCAACGGCAGCTCTATCGGCGG
AGTAGGCGTGGCAGGAAGCGGAGGAGCTACCGCCTCAGCGGGGGGCGG
CGGAGCGTCGTGCAAGGAAGCGCAGAGCTGCAAGGACACCAGCTCGCT
GAGCGGCAACAGCAGCATTGCGGGCAGCGCTGGAGCGGGCAACGCAGT
CCACTATTGCTGCGGCCGCTCCAAGTTCTTTTTGCCGGAGAAGAGGTTAC
GCAAGGAGGTGATTGTACCGCCCACCAAGTTTCTGCTGGGCGGCAACAT
CTCCGATCCACTCAACCTTAATTCGCTGCAGAACGAGAACACCTCGAAT
GCCTCCTCCACCAACAACACGCCGGCGACCACGCCCCGCCAGTCGCCCA
TCACTACGCCTCCGAAAGTGGAGGTGATCATACCGCCTAACATCCACGA
TCCGCTCCACCTGCTGGACCCCGflGATTCCATGGAGTACGAGAAGCAG
CTGACGTCGCCGATGAAGCGCGCTGGGCCAGGAGGTGGGATGCTCCACC
ACCGGCAGCACCACTATCGCACGCGAAAGAACCGAAAGCGACGGCGCT
TTGACTCCAACAACACCTCGCATGCCGGCGATGAAGGAGGGGTCGGAAG
CGAGCTGACCGACGAACCGCCGCTGCCCGCAGCCACCTCTTCGCTGGCG
GCGTCGCCGGTGGCAGCGCCCCTTAACGTAGGCGGCAGCTTGCTGCTGA
GCGAATCCGCTGCCCCAGCCCCGGGCGAAACGGCGGAAATGGGACAAC
AGCAGGAGCAGGCGCATGTGCACTCTCCGCAGTCGGCATCAACGACGAC
GACCGCCGCTGAGATGCCCACCCCGACGCCAACCAGTGCAGCGGCAGCG
ACTGCGACCGCGGAGCACAAGGAGCAGTCGGCTCCAGCGCCGACTGCA
ACGTCGTCGCCACAGCGGCAGCAGCAACATGTGGCCGCTGCAGCCGAGG
AACTCCCCACTCCGGAAACTTCCGCTGCTGCTGAGACGCCGGCAGAGGA
GATGCTCCTTAGCTGTTCGGCCACGTCGGCCTCACTGGTGGCTTCGACGC
TGGCAGAGCGAAGGGCCAGCCGAGACCTGCGTCTGGACTTGTCGAGCAC
GTGCTACGGCGTTGGCGGCACGGGTCTGAGCTTCGGCGGCAGCATCTCA
TCCAGCGTCGGCAGTAGCTTTGGTGGCGGTGGGAGGAAGAGGAAAATCA
GCGAGAGCAGCACTTCGCAAAAGAGCAAGAAATTTCATCGTCACGATGC
CATGGACAAGATTGTCAGTCCAGTGGTTCCGCAGCCAGGAGCCTGGAAG
AGACCGCCACGCATCCTTCAGCCCAGCGGAGCTAGGAAGCCCAGCACCC
GCCGCTCTACGTCCGTCAGCGAATCGGAACTACTCAGTCCCGTGGAAGA
GCAGCCGCCCAAACAGCTGCCCCTCATCGGGGTGGAGATACCCCGTGAT
GACACGCCGGATTTGCCGGATCATGGGCTAGGCAGTCCGCTGAGCACTA
CTTCGGGGGCCACCTCGCACACGGCCGGCGAGCAGGATTCTCTGGCCGG
TGTGGACATCAGCATGGGGGATACATTGGGGTCTGGGGTCGTGGGCAAG
GCACCGCTGACTAGTAGTCTTATGCTGGAACCGGCTAAAATTCCACCAA
TTAAAATGCTGCCAAAGTTTCGGGCCGATGGATTAAAGTACCGGTACGG
AAACTTCGACCGCTACGTGGACTTTCGGCAGATGAACGAGTTTCGAGAC
GTGCGCTTGCAGGTTTTCCAGCGTCACGTGGAACTGTTCGAGAACAAGG
ACATTCTAGACATTGGCTGCAATGTTGGCCACATGACCATTACGGTGGC
CAGACATCTGGCACCAAAAACAATTGTCGGTATTGACATTGACCGGGAG
CTTGTTGCACGAGCAAGGAGAAATCTGTCGATCTTTGTGCGTATTCCCAA
GGAGGAAAAGCTGCTGGAGGTCAAAGCAGAGCCAACGGTTGATGCAAA
AGCGAATATCGCGGTGAAGGATGAGACATCTGGAGCAGCTCACAAGAA
AACGAGACGGGGCAAGAGGAGACGCAAGGTGCATCAAGGAATACATCA
TCATCACCATCATCATCATGATTTAGAACAGCTGCAACAGCAACAGAAG
CTGACCTACGGACGTATTCCCCGTATTTTATCATCGAGTAAATCGCCCAA
CATGCTCGGGAACAAGAATCAGTTTCCGGCAAACGTCTTCTTCAGACAC
ACCAACTATGTTCTCAAGGACGAGTCATTGATGGCCAGCGATACCCAGC
AATACGATCTCATACTGTGTCTCTCAGTTACTAAGTGGATCCATCTCAAC
TTTGGAGACAACGGCTTGAAGATGGCATTTAAGCGCATGTTCAACCAGC
TGCGACCCGGTGGAAAACTTATACTTGAAGCCCAAAACTGGGCCAGCTA
CAAGAAGAAAAAGAACCTAACGCCGGAAATATATAACAACTACAAGCA
GATCGAGTTCTTTCCGAACAAGTTTCACGAATACTTGCTTAGTTCGGAGG
TAGGATTCAGTCACAGCTATACGCTTGGCGTGCCTCGTCACATGAACAA
GGGCTTCTGCCGACCCATACAGTTGTATGCAAAGGGCGATTATACCCCG
AATCACGTTCGTTGGAGCGATGCATATTATCCCCAGACGCCATATGAAG
CATATCGGGGCATTTACGCCACCCTGCCCGTTCACCGGATGGGCGGCGG
TGGGAGCAGCGCGGGCGGTAGCAATAGTGGGCATGCTCAAATGCTGCAC
CTTAGCAGCTCCAGTCGGTCGCAGAACTATGATACGCCGCACTACGCAG
GTAGCGCATCGGGATCGGCCAGCTGCAGACAGACTCCAATGTACCAGCC
CACCTACAACCCGTTGGAAACGGACTCATACCAGCCAAGCTACGACATG
GAATATCTCAACCACATGTACGTGTTCGCCTCGCCGCTTTACCAGACCGT
CTGGTCACCTCCAGCCTCGCTGCGCAAAAGCAGCTCGCATACTCCGGTA
TTTGGAAGCGTGCGCGATGCAGAGCTGGACGGTGATGGCAGTGGTGGTG
GGGGCAGTGGTGGCGGAAGCTACCACCGCCACGTCTATCCGCCAAACGA
CGACACTTGTTCGCCCAACGCAAACGCTTGTAATGCGTTTAACTCGATTC
GGGACGCGGACACAGACGATTCTAACCAGCTGCCTGGGGGAAGTCGAC
GACATGTGTATGCAACCAACTGCGGAGAGAGCTCCTCATCGCCGCAGGT
AAATCACCACGATGCGGTTGGCGAATTTGTGGACGGTCTTATGGACGAC
GAACAGAAGTCTTCAACAGGCGGAGGAACTGGTGGCGCAGCTTATTGTG
ATCTGTCGGATGCCTAG
>bin3|FBgn0033073
MEKRLSDSPGDCRVTRSTMTPTLRLDQTSRQEPLPQQPDNGPAAAPGKSKS
PTPLPGKSQAAQHHQFRAPQQQQGPKNRNKAWIYGLLGHSRDSPSHCGVG
SQGGSREHPEYP
>>CG8330|FBgn0033074ICDNA sequence
ATGGGCAACGTAATGGCGTCCACCGCAGACGCTGAGTCCTCTCGTGGGC
GTGGACATCTGTCCGCCGGACTACGCTTGCCGGAGGCACCGCAGTATTC
CGGCGGAGTGCCGCCACAGATGGTGGAGGCCTTAAAGGCGGAAGCTAA
AAAGCCCGAATTGACAAATCCCGGAACTCTTGAGGAACTGCACAGTCGC
TGTCGCGACATCCAGGCCAACACCTTCGAAGGCGCCAAAATTATGGTGA
ACAAGGGTCTGAGCAACCACTTCCAAGTGACCCACACCATTAACATGAA
TTCGGCTGGTCCAAGTGGCTATCGTTTTGGAGCTACCTACGTGGGTACCA
AACAATACGGGCCGACTGAAGCCTTTCCGGTTCTTCTTGGCGAGATCGA
TCCGATGGGCAATCTTAATGCAAACGTTATCCATCAACTGACCTCTCGTT
TGAGGTGCAAGTTTGCCTCGCAGTTCCAGGACTCAAAGCTGGTGGGCAC
CCAGCTGACGGGGGACTATCGCGGCAGAGACTACACGCTGACCCTGACA
ATGGGCAATCCGGGGTTTTTTACGAGTTCCGGAGTATTGTGTGCCAGTA
CTTGCAGTCCGTCACCAAACGTCTGGCGCTAGGATCGGAGTTCGCCTATC
ACTACGGGCCGAATGTGCCCGGACGCCAAGTGGCTGTATTATCAGCGGT
GGGACGTTACGCCTTCGGTGATACCGTGTGGTCTTGCACTTTGGGACCCG
CCGGATTCCACCTFFAGTTACTACCAGAAGGCCAGTGATCAGCTACAGAT
CGGAGTCGAGGTGGAAACGAATATCCGCCAGCAAGAGTCGACGGCCAC
GGTGGCATACCAGATTGATCTGCCCAAGGCAGACCTAGTCTTCCGCGGC
AGTCTCGATTCCAATTGGCTTATTTCCGGAGTCCTTGAGAAAAGACTGCA
GCCGCTACCGTTCTCGTTGGCCATTAGCGGTCGTATGAATCACCAAAAA
AATAGTTTTCGGCTGGGATGTGGCCTCATGATAGGATGA
>CG8330|FBgn0033074
MGNVMASTADAESSRGRGHLSAGLRLPEAPQYSGGVPPQMVEALKAEAKK
PELTNPGTLEELHSRCRDIQANTFEGAKIMVNKGLSNHFQVTHTINMNSAGP
SGYRFGATYVGTKQYGPTEAFPVLLGEIDPMGNLNANVIHQLTSRLRCKFAS
QFQDSKLVGTQLTGDYRGRDYTLTLTMGNPGFFTSSGVFVCQYLQSVTKRL
ALGSEFAYHYGPNVPGRQVAVLSAVGRYAFGDTVWSCTLGPAGFHLSYYQ
KASDQLQIGVEVETNIRQQESTATVAYQIDLPKADLVFRGSLDSNWLISGVL
EKRLQPLPFSLAISGRMNHQKNSFRLGCGLMIG
>>BcDNA:LD21719|FBgn0027519|cDNA sequence
AAAGAAGAAGAGCGAAGAAAACAGATAACTCCAATGTTTGCAAAACAA
TTTGATTAGTCTTGAAGGAATCCGCTTTAGGCTCTTAGGAACCCGCTTTA
TAGCGAGCACAGGCACGCACTGGCACACACAGCAAGCAAAGAGTGACA
ACATTATCCGTGAAGTGGACATATGGCCAACAAGAACATGCGTAACACC
ACAACCAAAGTGGAGGCCCTGATTGAGAGCTGTCGCAGCGAGGGCAAG
TGGCACCGGGTCATCGAGCTAACGGATGAACTGAAGACCGGGTCCCCGC
ACAATGAGTGCCTGGCCAACTTTCTGGTGGGGGAAGCTCGTCTGGAGAG
TTACCTGGAGGAAAACGCTCTCGCGTCAGACTCAAATTTTGGTCGCGCC
AAGTCTGGATTGGCGGAGGCCCGGCGTTTCCTTCACTTGGCTTTGGGTGA
GAGTGGCCAGAAGGCGGGCATCGCCCTGGACGCCTATTTGCTGCTGGCC
AAGCTGTGCTTTGCCTGCGGCGAGTATGAGCAGAGTCTAGACAATTTCG
TCAAGGCAGAACTCAACACGCTTGCCGAGAAGGAGCTGACCCTTCGCAG
CCTGAAGATCCTTGCGGAATCGTATGCCATCAAGGGATTGTGTCTGGAG
CAGCAGACTACGAAGCCGTCATCTAAGTTTAAGAAGGCCGAAAAGGAC
ACGGAAATGATTAGCTGTTTTGAGCGCGCATCTGATCTGGGGCTGCTCTA
TCTGCAGGAATACGATCTCGTTAGTGGAAGCAGTGGCTCGTCCAACAAC
TCGACAGCTGGTTCTACGTTGAATGTAAACGCCTCTACTGTGCAGCCGTC
GAGCAGCAGTTTTGCAATCAGCAGTACAATACCGGCGAGTGGTCCAAGT
GGACTGGAAATGAACCGCAGGATGGGCGCCATCCTAGAGACCGCCCTGC
AACGGGCACCCATAGTGCTTATTAAGACGGAAAAGCTTCAAGAGGCCGT
TGAACGGTATCGAATCATGCTAAACGCCATCGAAACGAGGGCTACTCAA
TCGTTGCGCCTCACGCTGGCCCGCCAGCTAGCTGAGGTTCTTTTGAGAGG
GGTCTCGGGCACGATTTACTCGCCTCCTTTTACCGGAAAATCTGGAGGTG
GGACGCTGCGAGGAGGATCCTCCAAGAAACTTTGGAAACCGCGTAAATA
CGCAGCCCGCCAGCAGTTTAACCCTCGGAACCAGCAGGAAGAGGTAATT
CTGTTGCTACTCATAGCCGAGGCACTGGCTGTGAGGGATACAGTTTTGTC
GCAGAGTCCAGAGTTTAGACAGGCCCGTCAGCATGCTATGGGCAACGTT
ACGGCCGTCTATGACCTCCTGACGTTGGCTACTGTGCGCTGGGGGCTCGT
CCAGCTATTAAATGAGTCCTTTGAGAAGGCGCTAAAGTTTAGCTTTGGTG
AACAGCATGTGTGGCGGCAGTACGGCTTAAGTTTGATGGCAGCCGAAAA
GCACTCGCACGCTTTAAGGGTCTTGCAAGAATCAATGAAGTTGACTCCT
AGTGATCCTTTGCCATGTCTGTTGGCTTCTCGCCTTTGCTACGAGAGTCT
GGAGACGGTAAAGCAAGGTCTGGACTATGCTCAGCAAGCGCTGAAGCG
CGAAGTAAAGGGCTTGCGACCATCGCGAAGCCAACTCTTTGTGGGCATC
GGTCACCAACAGCTAGCCATCCAGTCAAATCTTAAAAGCGAGCGAGATG
CTTGTCACAAGCTGGCTTTGGACGCCCTGGAGCGCGCTGTGCAGTTTGAT
GGGAACGACCACCTGGCGGAATACTACTTGTCGTTGCAGTACGCACTTC
TGGGACAGCTGGCGGAGGCATTGGTTCATATCCGTTTCGCGCTGGCGTT
GCGTATGGAACATGCGCCATGTCTACACCTGTTCGCACTGTTGCTGACAT
CGTCGCGCCGACCTCGTGAAGCTTTGGGAGTTGTTGAGGATGCTTTACAC
GAGTTTCCCGATAACCTGCAGCTACTGCACGTTAAGGCACATCTTCAGCT
GCATCTAGAGGACGCGGAGACGGCGTTGGGCACTGTGCAGCACATGCTG
GCCGTGTGGCGGGACGTTTACGAGGCCCAGCTAGCGGGAGAGGAGGAA
AAGCACTCAGACACCAAGAGTGGTGTTCACTTGGCACATTCCTCACAGA
TGTCCGACAAGGATTCAAATTCTGTGTACGCGGCTTCATFITGGCTGCAGTC
TCCCGCGTTGAACAGGCTCTGAGTGAAGCAGCAAGCTCATTGAGCTCAT
TTACGCAGCGTCCTGGACCCCGACGACCCTGGATGCTACAGATTGAAAT
ATGGCTTCTGCTGGCTGATGTCTATCTGCGGATTGATCAGCCGAACGAG
GCACTCAACTGCATACACGAAGCCTCACAGATTTATCCGCTTTCGCATCA
GATTATGTTTATGCGTGGCCAGGTGCATGTCTATTTGGAGCAATGGTTTG
ACGCCAAGCAATGTTTCCTGAACGCCGTGGCCGCCAACCCAAATCACAC
AGAGGCTTTGCGTGCGCTTGGAGAGGCGCATTTGGTACTGGGCGAGCCG
AGGTTGGCTGAAAAAATGCTAAAAGATGCGGCCAAACTGGATCCGAGCT
GTCCAAAAATTTGGTTCGCACTGGGAAAGGTGATGGAGATCCTGGGCGA
TTTCCATGCCTCAGCCGATTGCTTCGCCACGTCGCTGCAGTTAGAGCCAT
CATGTCCGGTGCTACCTTTTACTTCTATACCTTTGGTGTTTGAATAGGAA
CACTTTCGTGTCTAATTCGAAGCTTGACAAACCTCAAAGTCAACAGCAA
TACTAGAATTATACTTCCTAATTCCTTCAGTGTAAAAATTGTTGTATCGC
AGTTTTGGAGCAACAAATGTTTAAATATTGTTTGTGTGTAAATTATTACC
AAGAATTGTTCGAGCTTGGCTGTATTATGTGAATGAACCATTCTGCTATC
TTCCTTAATCACCCACTTTTAAGGAGATGGTTCGGTTAAATTTATTACTC
TATTAGGTGTTGTTAATTACATACAAAATTGGTTATTATATAAATATACA
GTATTTCGTG
>BcDNA:LD21719|FBgn0027519
MANKNMRNTTTKVEALIESCRSEGKWHRVIELTDELKTGSPHNECLANFLV
GEARLESYLEENALASDSNFGRAKSGLAEARRFLIILALGESGQKAGIALDA
YLLLAKLCFACGEYEQSLDNFVKAELNTLAEKELTLRSLKILAESYAIKGLCL
EQQTTKPSSKFKKAEKDTEMISCFERASDLGLLYLQEYDLVSGSSGSSNNST
AGSTLNVNASTVQPSSSSFAISSTIPASGPSGLEMNRRMGAILETALQRAPIVL
IKTEKLQEAVERYRIMLNAIETRATQSLRLTLARQLAEVLLRGVSGTIYSPPFT
GKSGGGTLRGGSSKKLWKPRKYAARQQFNPRNQQEEVILLLLIAEALAVRD
TVLSQSPEFRQARQHAMGNVTAVYDLLTLATVRWGLVQLLNESFEKALKFS
FGEQHVWRQYGLSLMAAEKIHSHALRVLQESMKLTPSDPLPCLLASRLCYES
LETVKQGLDYAQQALRREVKGLRPSRSQLFVGIGHQQLAIQSNLKSERDAC
HKLALDALERAVQFDGNDHLAEYYLSLQYALLGQLAEALVHIRFALALRME
HAPCLHLFALLLTSSRRPREALGVVEDALHEFPDNLQLLHVKAHLQLHLEDA
ETALGTVQHMLAVWRDVYEAQLAGEEEKHSDTKSGVHLAHSSQMSDKDS
NSVYAASLAAVSRVEQALSEAASSLSSFTQRPGPRRPWMLQIEIWLLLADVY
LRIDQPNEALNCIHEASQIYPLSHQIMFMRGQVHVYLEQWEDAKQCFLNAV
AANPNHTEALRALGEAHLVLGEPRLAEKMLKDAAKLDPSCPKIWFALGKV
MEILGDFHASADCFATSLQLEPSCPVLPFTSIPLVFE
Scim21
AE003789 (insertion @11490), nearest ORE (CG9397 gene 1.28) @11901
>>1.28|FBgn0010347|cDNA sequence
CCCGTCATTGTTGTCAATAAACAAAAGCTGGCTCGCAGTCACAGCGACT
AGGAGGTTAACCTGACTFACCCGTTTCGGTTTTGAATTCGGTTTCATTGT
CGCTTTCTTGAACTTGCGAGCACCGCGTGGCCAATCTTGCAGAATGAATT
TCGGGTGTGCACCGGAAACAACCGACAGTGAAATAACTACTGGCCATTC
ACAAATCCATAAAGCACAGTGTAACACTTTGTAACGGATCGCAAATCCA
ACCACCCCACGCAAATCAAAGCTTAATGCCAAAAGTCATACAAGTGCAA
TTGATTTAAATGAATTTTTGTTTAATTTGTATAAAGTCGTAAAATGCAAG
TTCATGGCGATATATATATACCAATTTGTGCAAACTGATGGGGAAAATC
GGAATGGTAACACCATTAAGGGCAGTGCGGCTAAAAATTGCTGACGAG
CAACTTTCAGATTAATGCAATTCAAATTGGCTTTCCGTCGACTAACAATA
AGCCGTTGGGAATAGCAGATGTGTGCTAAAGCAGATCCAGAGTTCTGGC
AGCAGTTAACACCAATTAAAAGCGTCGTTATAGCAATAGTGCAGCAAAC
ATAGAGGGAAAATGTCAGTCACTCAGCCAAAGGATACGGCATTAAAGA
CCAAGGAGTCGGCAGCTGAAGTAGCAGCCCCTCTGGCCCCACTCTCTGT
CAAAACAGCAGGAGCAACGGGACGGAAAACTTTAACCTCCAGCGCGGC
TTTGTCACTGTTTGATCAGCTGAAAAATAGCGTCAATACAAACAGTTTGA
CAATTGGCGCCGGCGTCGGCAACAACAGTAGCCCAGAAGCCACACCACC
TATAACAGCACCAGCCAGTACAACCACCGCCTCCCCGATACTTACTCCC
AAAAGCCCACCACCCACACCACCCATCAACAAAAGCCCGTCTCTGTCCT
CCAATATTGAACTGAAGCCCCCGGCCAAACCCGCTCGGCCCTTTACCTC
GCCCAGCACTATTGGAATCGTGCAGGGTACCAAACGGGGGGTGGGCGG
AGTTTTTGGCGGGTTTGGAGCCCAAGCCGCCAAATTGGATATAAACGCA
TTGCGATCTCAGCTCTACCAGGGCGCCAGGAAGACTGCAACAACATCTC
GAGTGGGAGTCGGCAAAACAACAACGGTGGCAACAGCCCCAAGAACAA
CTGGAGGAGAACGTGGCACAAAGGGGTCCAAGAAGAGATGTCTAGATC
GGTACGACTCGTCGGAGTCATCAGACAGGTGAGTGCATGTCGTGGGCAC
ACTACTGAAGCATGCAGTGCGGCTGTCCCTGCATCTTGGCTACTGTTTAA
TGGCCTTCGGTGGGGCAGTGGTAGCTGGACGCACCCATTGTCAATATCA
ACAGGTAACGCCACGAAAAACCACTGAGGTATTTGCATTTCCCATTATT
ATTACTGCTGCTGCAGCTGTTGCACCTCGGTCCAACTCCTCGCCCTGGAG
TGCTAATGGCCATCAGTCTGAGCTGGTCAGAATATGCACCCTGGGAGCG
TGTGAAATTTTCTGTTGCCGTTTTCGGTTCCCTGGTCTTTGTTCTGTTGCG
GAGCAATTTGTTGCTGGCCACGTGAAACAAGGCCCGGCAAAAGGGTGTT
TTCAGGGAAATGAGCAGCGCAATGGCAATCGCAGAGGCAAAAGGCCAG
GGGCAAATTGGTAATTAAGTTGTCTCCCGAATGAGGAACTCCGAACGGG
GAGGAGCCACTCCTGGCCCGGTGGAAGCTTCGACTTCCCTAATGAAGTT
ATTTGGTCCAGGAAAATTTCTTTAATTGTAAAAGAATCACTATTTTAATA
AAAGAAACTGGTGATAGTGTTAATCTATATTATAA
>1.28|FBgn0010347
MSVTQPKDTALKTKESAAEVAAPLAPLSVKTAGATGRKTLTSSAALSLFDQ
LKNSVNTNSLTIGAGVGNNSSPEATPPITAPASTTTASPILTPKSPPPTPPINKS
PSLSSNIELKPPAKPARPFTSPSTIGIVQGTKRGVGGVFGGFGAQAAKLDINA
LRSQLYQGARKTATTSRVGVGKTTTVATAPRTTGGERGTKGSKKRCLDRY
DSSESSDR
Scim22
AE003789 (insertion @249000), nearest ORE (CG3268:phtf) @250208
>>phtf|FBgn0028579|cDNA sequence
ATTTGTGAGCACACACTTTAGTTTTTCGTTAGGAACGGGACGTTCGTTCT
GTTGCGCACCAAATTTTTTCGGACCCAATGCAAATGCAAACGCTTTTGCG
GCGTGTGTAGTGCATTCAAAATTACCAGATACCCAACGGGATCCAAAGT
TCCCAGAGCAGTGGCACCGGAATCGATGCGACCAGCAGTCAGCGGAAG
CGTAAGAAATTCGCGCCTAGGTGGACAAAAATCGATCTGTGACGCGGTT
TAAACCAAGGCTGCACGACACTTCGAGGACTTTTATGTGATTATTACTAT
GAAATTGGATGAAATAGTTGCATGGTACCAGAAGAGAATCGGCACCTAT
GACAAGCAAGAATGGGAAAAGACCGTCGAACAGAGGATATTGGACGGC
TTCAATAGTGTCAATTTAAAAAACACCAAGCTGAAGACGGAGCTAATCG
ATGTGGACTTGGTGCGAGGTTCCACGTTCCCTAAGGCCAAGCCCAAGCA
GTCGTTACTCACTGTGATACGCCTGGCCATTCTGCGCTATGTCCTGCTGC
CCCTCTATGCCCAGTGGTGGGTCAAGCAGACCACGCCAAACGCCTTCGG
CTTCATCCTTGTGCTTTACCTCACACAGTTAACCAACTGGGCTATCTACG
TGCTTCACAGCAGTCGCATAGTGCCCCTTGACTATGAGAAGCCGCCAAA
TGGAACCCTGCTTCAGGCAGAGGCAGATGGAGATGCCTCCGATAAGGAT
GCAGATAAGGAGTCCGAGGAACATGCCGCCCTCCTCAGTGCCCTGCTTA
TTCCGTGCGCCCTAAGCTTGCTGATCAGTCTCATCCACTCACAAATTGTA
GCCACTAACACCGCCTCGGGTGTCTCTGGCGGGAGTAGCAAGAACAAGC
TGCGTCGCATATCTGCAAGCTACTTAAGCGACAAAGCAGCAACCAGGGA
GAACCGGGTGCGACGTCGCAAGAAGATTGTGCGAGTTCGACAAGTGGA
GGCTGACTTGTCCCAGGCCAGCAGTAACATATCACTTCCAAACAGAAGA
ACCGCAACCAGCACAATCGAAGTTCTTCCCAGACCGGTCACGCCTTTGC
CTTCACCAACAGTTACCTGTGCCACGGTGCCAGACCCCACCACGCCGAC
TACGCCTTCGCCATCTGTTATCAGGCGGAGCACCAACGAGGAGACCTAT
TTGACAACGACTGCAATCAGCCCACTAACGCAACCGCTGGCAGCCATAG
ACGCATGCTACGATCTCAGCAGAAAGGCAGGGGGAGCTGCTCCCGAAA
GCCCCAAAAAGCGCAACGTCAACTGGCACACGCCTATTCAGATATACGC
TACCTACGAGCTGGGCGAAGAGCCGTGCTCCAGCAGAAAAGTCGCAGA
AGAAAGTGCGCCTGAGTCGGTTGGAGAAAGATTGTGTTCCGTCAAGCCA
GACTACCAGACGCGTCGAAACATCGGGGAGGACGATGGCTTCGAGAGT
CTGAATGGAAAGAGCTCAAGTGGAGAGGACAACAACCATTCGCCTTTGC
CAAACGCGGTGGCTGTTGCGGCTCCACCAGCTCCTGTTCAGACCAATCA
GTTGCGTCTGCGATTAAACACAACAAACGGTGTGACCGCCAGTGCTTCT
CCAACCGAGAAGAAACCCCAGTCGCGCGGCAATGAATCCTCAACGAGTT
GCGCCGAATCGGATGAGTGCGATGATGCCGACATTATGTCCAGTCCCGC
CTCGGGCTGTAACCAAGAGTGCACCACTTCTGCCACCGACTGGCTGGGG
GTGACGACAAATAGCGAAGACTGCAGTTACACCTCTGATCTGGATCACT
CTGACGGGGGCTTGAAGCACACGGCCTTTAGCGACGAAGATCCTGGAGA
GCTGGACATCACCCCTACCACTATACTAAATCCACATAGCAGCCTCGAC
CGTATTAGCTGCACCATTTGGGATCAGCGAGATGCCAAAAAGGCGCAGC
TTTCCGTGCTGGAGATCGCGTCTTGCATAATCGAACGCGTGGACTCAATG
GGCGAGGCCAACGACTACATCTACATAGGCGTGGTCTTCTCTTTCCTGCT
CACATTGATTCCCATCTTCTGCCGTCTCTGCGAGGTATGTTGCCGGGAAG
GTTTTGGTGGAGGAGACTACTTATTACTGGTCAAATGCACTCAGGTCACA
CTCGGGAGCGATGCAGAGAAGGCCAGTGAGATTAGCTACTTTAACATGC
CGCAGCTGCTGTGGGAGAAGTCATCGGCATCGCTCTTCACCCTGCTGGG
CCTTGCCTTCGGCGACAGCCAGTGGGAGCGCATGGTATTGGCTCTGGGC
TTTGTCCAACGCCTTTGCCTGACCCTCATACTGTTCATAATATTCGCCGTT
GCAGAGCGCACCTTCAAGCAACGCTTCCTTTACGCCAAACTCTTCTCCCA
CCTAACTTCATCACGTAGGGCTCGAAAGTCAAATCTTCCCCACTTCCGTT
TGAACAAGGTGCGTAACATCAAGACCTGGCTGAGCGTGAGGTCGTATTT
GAAGAAACGCGGACCCCAGCGATCGGTGGATATCATCGTTTCCGCCGCC
TTCATAGTAACCCTCCTGTTGCTGGCCTTCCTCAGCGTCGAGTGGCTGAA
GGATTCGGCTCATCTGCACACACACCTTACCTTGGAGGCCCTAATCTGGT
CCATAACAATCGGTATCTTTCTGCTGCGCTTCATGACCCTAGGTCAGAAG
ATACAGCACAAGTACCGCAGTGTGTCGGTGCTGATTACGGAGCAAATTA
ACTTGTATCTGCAGATCGAGCAGAAGCCAAAGAAAAAGGACGAGCTGA
TGGTGTCGAACAGCGTGCTCAAGCTGGCCGCCGATCTGCTAAAGGAACT
CGAAACGCCATTCAAGCTCTCTGGCCTTAGTGCCAATCCATATCTATTCA
CAACCATCAAGGTGGTAATCCTGTCGGCCCTATCGGGCGTGCTTAGCGA
AGTTTTAGGCTTTAAACTGAAGCTGCATAAAATCAAGATCAAGTAACCT
ATGCAAGGCGCAGACCCATCATATTTTTGTAGTACAACTTTTTAGAAACG
CTTTAAGAGAAATCTAACACTACACTCTAAATTAGTTAAGTGAATAAATT
TAAGCGAGCC
>phtf|FBgn0028579
MKLDEIVAWYQKRIGTYDKQEWEKTVEQRILDGFNSVNLKINTKLKTELIDV
DLVRGSTFPKAKPKQSLLTVIRLAILRYVLLPLYAQWWVKQTTPNAFGFILV
LYLTQLTNWAIYVLHSSRIVPLDYEKPPNGTLLQAEADGDASDKDADKESEE
HAALLSALLIPCALSLLISLIHSQIVATNTASGVSGGSSKNKLRRISASYLSDK
AATRENRVRRRKKIVRVRQVEADLSQASSNISLPNRRTATSTIEVLPRPVTPL
PSPTVTCATVPDPTTPTIPSPSVIRRSTNEETYLTTTAISPLTQPLAAIDACYDL
SRKAGGAAPESPKKRNVNWHTPIQIYATYELGEEPCSSRKVAEESAPESVGE
RLCSVKPDYQTRRNIGEDDGFESLNGKSSSGIEDNNHSPLPNAVAVAAPPAP
VQTNQLRLRLNTTh4GVTASASPTEKKPQSRGNESSTSCAFSDECDDADIMSS
PASGCNQECTTSATDWLGVTTNSEDCSYTSDLDHSDGGLKHTAFSDEDPGE
LDLTPTTILNPHSSLDRISCTIWDQRDAKKAQLSVLEIASCIIERVDSMGEAND
YIYIGVVFSFLLTLIPIFCRLCEVCCREGFGGGDYLLLVKCTQVTLGSDAEKAS
EISYFNMPQLLWEKSSASLFTLLGLAFGDSQWERMVLALGFVQRLCLTLILFI
IFAVAERTFKQRFLYAKLFSHLTSSRRARKSNLPHFRLNKVRNIKTWLSVRS
YLKKRGPQRSVDIIVSAAFIVTLLLLAFLSVEWLKDSAHLHTHLTLEALIWSIT
IGIFLLRFMTLGQK1QHKYRSVSVLITEQINLYLQIEQKPKKKDELMVSNSVL
KLAADLLKELETPFKLSGLSANPYLFTTIKVVILSALSGVLSEVLGFKLKLHM
KIK
Scim23
AE003838 (insertion @162500), nearest ORF (CG8709) @162503
>>CG8709|FBgn0033269|cDNA sequence
AGCAACAAGTGAACGGAAGAATCCGAGCAGTGAAGAATCAGAAAGACC
GAGGAAACACTCGAGAACTCTTTAATAACATTGTGAACCAAAAAACCAG
AAACAGCCACTGAAAATACACGGAAAGCAGAGTGATTCGCCATAGTTTT
GCTAGTGTTTTCAAGGGCACCCATCATACAGCTGTGCTGCAAATTTTGTG
CCAGTTGCCGTATCTCAGAAGCAGCGGGTCCAAAGTACCGCCAAATACG
CCGTAGAGCCGATTCCTTCGCCAATAAGCGGCGCATTTGACCGCCTGCC
CATAAACATGGCCGCCATATAACCACAAACGGTGAACGCAACCACACA
AAGTCGGAGCTTTGCGATTAGACAAGTAGATAGCAGCGGGGAGTTCAAG
GAGAGATCCCCGCCAGCAAGGAAATCCATTTTGAAGGGAGACCAGCCG
CAGCAGACCAAAGATGAATAGCCTGGCGCGGGTTTTCAGCAACTTCCGC
GACTTCTACAACGACATCAATGCCGCCACCCTCACGGGAGCCATCGATG
TGATCGTGGTGGAGCAGCGCGATGGCGAGTTCCAGTGCTCGCCCTTCCA
CGTCCGGTTCGGCAAACTGGGAGTGCTCAGGAGTCGGGAGAAGGTGGTG
GACATTGAGATCAATGGCGTACCGGTCGACATACAGATGAAGCTGGGCG
ATTCTGGCGAGGCCTTCTTTGTGGAGGAGTGCCTGGAGGATGAGGACGA
GGAGCTGCCAGCCAACCTGGCCACCTCGCCCATACCCAACAGCTTCTTG
GCGTCTCGGGACAAGGCCAACGACACCATGGAGGACATCAGTGGAGTG
GTGACAGATAAGCACACCGACAACACACTGGAGCGTCGCAACCTAAGC
GAAAAGCTCAAGGAGTTCACCACGCAGAAGATCCGGCAGGAGTGGGCC
GAGCACGAAGAGCTGTTTCAGGGCGAGAAGAAGCCGGCGGACTCGGAC
TCGCTGGACAACCAAAGCAAAGCTTCAAACGAAGCTGAGACGGAGAAG
GCAATTCCGGCGGTCATTGAAGACACGGAAAAAGAAAAGGATCAGATC
AAACCAGACGTTAACCTCACCACGGTCACAACCAGCGAAGCCACCAAG
GAGGTGTCCAAGAGCAAAACCAAGAAGCGGCGCAAGAAGTCGCAAATG
AGAAGAATGCCCAGCGCAAGAACTCTTCAAGCAGCTCATTGGGCAGCG
CCGGCGGCGGTGATTTGCCTTCGGCGGAGACGCCATCACTGGGAGTGAG
CAACATCGATGAAGGAGATGCCCCCATATCCAGTGCCACAAACAACAAC
AACACCTCGTCGTCGAACGATGAACAGCTATCCGCTCCCCTGGTGACAG
CTCGCACTGGGGACGATAGTCCGCTCAGCGAGATTCCCCACACCCCCAC
TAGCAATCCACGTCTGGATTTGGACATTCACTTCTTCAGCGACACGGAG
ATCACCACTCCCGTGGGTGGCGGTGGTGCTGGGTCAGGTCGTGCCGCCG
GCGGACGACCTTCGACTCCCATCCAAAGTGACAGTGAACTGGAAACCAC
CATGCGAGACAACCGTCACGTGGTGACTGAAGAAAGCACCGCATCGTGG
AAGTGGGGCGAGTTGCCCACACCGGAGCAGGCCAAGAATGAGGCCATG
AGCGCCGCCCAGGTGCAGCAAAGCGAGCACCAATCGATGCTCAGCAAC
ATGTTCAGCTTCATGAAGAGGGCAAATCGGCTACGCAAAGAGAAGGGC
GTCGGCGAAGTGGGTGACATCTACCTGTCTGATCTGGATGCCGGCAGCA
TGGACCCCGAGATGGCGGCCCTCTACTTCCCTAGTCCCCTGTCCAAGGCG
GCATCACCGCCGGAGGAGGATGGCGAAAGCGGCAATGGCACCAGTCTG
CCTCACTCGCCCAGCTCGCTGGAGGAAGGTCAGAAGAGTATTGACTCGG
ACTTTGACGAGACCAAGCAGCAGAGGGACAACAAGTACTTGGACTTTGT
GGCCATGTCCATGTGCGGAATGTCGGAGCAGGGAGCACCACCCTCGGAC
GAGGAGTTCGACCGCCACCTGGTCAACTATCCAGACGTGTGCAAAAGCC
CCAGCATTTTTTCATCGCCTAACCTAGTCGTACGGCTGAATGGCAAATAC
TACACCTGGATGGCTGCATGTCCCATTGTCATGACAATGATCACCTTCCA
GAAGCCACTAACCCATGATGCCATTGAGCAGCTGATGTCTCAGACAGTC
GACGGCAAGTGTCTGCCTGGCGACGAGAAGCAGGAGGCAGTTGCCCAG
GCCGACAATGGGGGTCAGACGAAGCGCTACTGGTGGAGCTGGCGACGC
TCGCAGGACGCTGCGCCCAACCACTTGAACAACACTCATGGTATGCCTT
TGGGCAAGGATGAGAAAGATGGTGATCAGGCAGCTGTGGCAACGCAAA
CTCGCGGCCTACCTCGCCCGACATCACCGATCCCACGCTGAGCAAGAG
CGACTCCCTGGTGAACGCGGAGAACACCTCGGCGTTGGTGGACAACCTG
GAGGAGCTAACCATGGCCTCCAACAAGAGCGACGAGCCCAAAGAGCGT
TACAAGAAGTCGCTGCGACTTAGCTCGGCGGCTATCAAAAAACTGAACC
TCAAGGAGGGCATGAATGAAATCGAGTTCAGCGTAACGACCGCTTATCA
AGGGACGACGCGCTGCAAGTGCTACTTGTTCCGCTGGAAGCACAACGAC
AAGGTGGTGATCTCGGACATTGACGGCACCATCACCAAGTCGGACGTGC
TGGGCCACATTTTACCCATGGTGGGCAAGGATTGGGCGCAACTCGGTGT
GGCGCAGCTCTTCGAAGATCGAGCAAAACGGCTACAAGCTGCTCTAT
CTGTCAGCCCGTGCCATCGGCCAAAGCAGGGTGACACGCGAGTACCTCC
GGTCGATCCGGCAGGGCAACGTGATGCTGCCGGACGGACCGCTGTTGCT
GAATCCCACGTCCCTGATATCGGCCTTCCACCGCGAGGTGATTGAGAAG
AAGCCGGAGCAGTTTAAGATCGCCTGTCTGTCGGACATCCGCGATCTGT
TTCCCGACAAGGAGCCCTTCTACGCCGGCTACGGCAACCGCATCAATGA
CGTGTGGGCATACCGAGCAGTGGGCATTCCCATCATGCGCATCTTTACG
ATCAACACCAAGGGCGAGTTGAAGCACGAGCTGACCCAAACATTCCAGT
CCTCTGGCTACATCAATCAGTCGCTAGAAGTCGACGAATACTTTCCCCTG
CTAACCAACCAAGATGAATTCGATTACCGGACGGACATCTTCGACGACG
AGGAGTCCGAGGAGGAGCTTCAGTTCAGCGACGACTACGACGTGGACGT
CGAGCACGGTTCGAGTGAGGAAAGCAGTGGGGATGAGGACGATGACGA
AGCCCTCTATAACGATGATTTTGCCAACGATGACAATGGCATCCAGGCA
GTCGTGGCCTCCGGCGACGAACGGACCGCCGATGTGGGCCTCATAATGC
GAGTCCGCCGCGTCTCCACCAAAAACGAAGTCATTATGGCTTCGCCTCC
CAAATACTGCAGCATGACGTACATCGTCGATCAACTGTTCCCGCCGGTG
AAACTCGACGAAGCCTCCGCCGAGTTCTCCAACTTCAACTACTGGCGCG
ACCCCATCCCCGACCTGGAGATCCCCGAGCTGGAGACGGCGCTGGTGCC
ACCGAGCACCAAGGTGGACATGGCCACCCTGCGCCCCATTCCCGAGAAG
TGA
>CG8709|FBgn0033269
MNSLARVFSNFRDFYNDINAATLTGAIDVIVVEQRDGEFQCSPFHVRFGKLG
VLRSREKVVDIEINGVPVDIQMKLGDSGEAFFVEECLEDEDEELPANLATSPI
PNSFLASRDKANDTMEDISGVVTDKHTDNTLERRNLSEKLKEFTTQKIRQE
WAEHEELFQGEKKPADSDSLDNQSKASNEAETEKAIPAVIEDTEKEKDQIKP
DVNLTTVTTSEATKEVSKSKTKKRRKKSQMKKNAQRKNSSSSSLGSAGGG
DLPSAETPSLGVSNIDEGDAPISSATNNNNTSSSNDEQLSAPLVTARTGDDSP
LSEIPHTPTSNPRLDLDIHFFSDTEITTPVGGGGAGSGRAAGGRPSTPIQSDSEL
ETTMRDNRHVVTEESTASWKWGELPTPEQAKNEAMSAAQVQQSEHQSML
SNMFSFMKRANRLRKEKGVGEVGDIYLSDLDAGSMDPEMAALYFPSPLSK
AASPPEEDGESGNGTSLPHSPSSLEEGQKSIDSDFDETKQQRDNKYLDFVAM
SMCGMSEQGAPPSDEEFDRHLVNYPDVCKSPSIFSSPNLVVRLNGKYYTWM
AACPIVMTMITFQKPLTHDAIEQLMSQTVDGKCLPGDEKQEAVAQADNGG
QTKRYWWSWRRSQDAAPNHLNNTHGMPLGKDEKDGDQAAVATQTSRPTS
PDITDPTLSKSDSLVNAENTSALVDNLEELTMASNKSDEPKERYKKSLRLSS
AAIKKLNLKEGMNEIEFSVTTAYQGTTRCKCYLFRWKHNDKVVISDIDGTIT
KSDVLGHILPMVGKDWAQLGVAQLFSKIEQNGYKLLYLSARAIGQSRVTRE
YLRSIRQGNVMLPDGPLLLNPTSLISAFHREVIEKKPEQFKIACLSDIRDLFPD
KEPFYAGYGNRINDVWAYRAVGIPIMRIFTINTKGELKHELTQTFQSSGYINQ
SLEVDEYFPLLTNQDEFDYRTDIFDDEESEEELQFSDDYDVDVEHGSSEESSG
DEDDDEALYNDDFANDDNGIQAVVASGDERTADVGLIMRVRRVSTKNEVI
MASPPKYCSMTYIVDQLFPPVKLDEASAEFSNFNYWRDPIPDLEIPIELETALV
PPSTKVDMATLRPIPEK
Scim24
AE003828 (insertion @25523), nearest ORF (CG6751) @23789

>>CG6751|FBgn0033562|cDNA sequence
TTTGAACTGCACGTGTTTATCAATTCGTTTGGTGTATCAAACTAAGTTGA
AAAATATAATCATAATGGCTGAGGAAGGACCACCGGAGCCGAGCATTG
ATTTTGTCCCAGCTCTTTGCTTTGTACCACGCGGCGTGGCTAAGGATCGT
CCCGACAAGATCGTGCTGACGCAGGCGGAGCTGGCCAGGATTATCGGTG
ATACGCAACAGGAATTGGACGAGGAGAGCGACGACGATGCAGAGGAGG
GCGAAAATGCCGAGGAAGACCAAAACGACATGGATGTGGACGACCACG
CGGATGCCAATAGTGAGAACCGCGATCCGCAGGACGAGTTCCAATTCCA
GGAGTATGACAACGAGGCGAATGCTAATGTCACCAGTCTGGCCAACATC
GTGGACGCTGGCGAGCAAATCCCCGATGAGGACGAAGACTCCGAGGCC
GAGGACGAGGTGATCAAGCCCAGCGACAACCTCATTCTAGTGGGTCACG
TTCAAGACGACGCCGCCTCCATGGAGGTGTGGGTTTTCAACCAGGAGGA
GGAGGCTCTCTACACCCACCACGACTTTCTGCTGCCAAGCTTTCCTCTGT
GCATCGAGTGGATGAATCACGACGCGGGCAGCGAAAAGGCGGGCAACA
TGTGCGCCATCGGCTGCATGGATCCGATAATCACAGTCTGGGATCTAGA
CATACAGGACGCTATCGAGCCCACATTTAAGCTGGGTTCCAAAGGCAGC
CGGAAGCAGAACAAAGAGCAGTATGGACACAAGGACGCCGTGCTGGAT
CTCTCTTGGAACACCAACTTTGAGCACATTCTGGCCAGCGGGTCCGTGG
ACCAAACTGTGATTCTGTGGGACATGGACGAGGGCCAGCCTCATACAAC
CATTACCGCTTTTGGCAAACAGATTCAGTCGCTGGAATTCCATCCGCAAG
AGGCTCAAAGCATTCTTACCGGCTGTGCCGATGGATACGTGCGACTCTTC
GATTGCCGCGACGCTGAGGGCGTCAACTCGTCCAGCATTGAGTGGAAAG
TTGACGGTGAAGTGGAGAAGGTCCTGTGGCATCCCACACAGACCGACTA
CTTCATCGTGGGCACCAACGATGGCACCTTGCATTACGCCGACAAACGT
TCTCCTGGACAACTGCTGTGGTCCGTAAAGGCCCACAACGAGGAAATCT
CCGGTGTGTGCTTCAACAACCAGAAGCCTAATCTGCTGACCTCCACCTCC
ACGGAGGGCACCCTAAAGGTGTGGAACTTTGATGGCACAGAGGCAAAG
CACGTCTACGAGCACGAGTTCAACATGGGTCGCTTGCAGTGCATGCGCC
AGTGCCCCGAGGATCCCTACACCCTGGCCTTCGGCGGAGAGAAGCCTCC
GCGCTGTGCGATCTTTAACATCAAGAACTCGATAGCCGTGCGCCGAACG
TTTGGAATCCCTGATGCAGAGTAGGCAAATCGTACAGCTACGTATTTATC
TGTGTATATGCTTTATATGACTTTTAAATAAATATGAATTATATATAAGA
ACCTTAATGATTGACTTTTATATTAATTAAAATTTTATTGATAACTTGCGC
ATATATGCACTTTACACTTTTATGCTTAAACAACTAATCGACATTTCAGG
GGGGATGGGTCACAAACGAAATACAAAACATTAATCCTAAACATTCCGA
GCATTCCTTAACACTACATTACGTATACCAAATAAGCTTATCTGTGCTCC
TAACTCTTGAATAGACCCACGCACATCAGGAGATTTCGGCGCGTAAAGT
GCAGGCTGACAAAT
>CG6751|FBgn0033562
MAEEGPPEPSIDFVPALCFVPRGVAKDRPDKIVLTQAELARIIGDTQQELDEE
SDDDAEBGENAEEDQNDMDVDDHADANSENRDPQDEFQFQEYDNEANAN
VTSLANIVDAGEQIPDEDEDSEAEDEVIKIPSDNLILVGHVQDDAASMEVWVF
NQEEEALYTHHDFLLPSFPLCIEWMNHDAGSEKAGNMCAIGCMDPIITVWD
LDIQDAIEPTFKLGSKGSRKQNKEQYGIIKDAVLDLSWNTNFEHILASGSVDQ
TVILWDMDEGQPHTTITAFGKQIQSLEFHPQEAQSILTGCADGYVRLFDCRD
AEGVNSSSIEWKVDGEVEKVLWTIPTQTDYFIVGTNDGTLHYADKRSPGQLL
WSVKAHNEEISGVCFNNQKPNLLTSTSTEGTLKVWNFDGTEAKHVYEHEFN
MGRLQCMRQCPEDPYTLAFGGEKPPRCAIFNIKNSIAVRRTFGIPDAE

Scim25
AE003815 (insertion @3170), two ORFs nearby: CG8151 @878 to 3125, CG13941
@3609 to 4190
ESTs in the clot C#3527—have 96% identity with CG8151 gene product
>>CG8151|FBgn0033929|cDNA sequence
GCAAATAACGTGGGATTGTGCGTTTTGCCGACCGCGAAATGGGGAAAAG
TATCGCCGGCGCAGGCGACATACGCAAACACCAGGCGGCACTTTTCCGC
CAGCCGAAGATGCTTCTTAGATCGCATTTCATGCTCTTTCAGGTTGCAGG
AATCTTCTGGCGTCCCCCTTCTCGTCCTTTCGAAGGCTCTCATGTGAGAC
GGCGAGCGTGGATCTGCGACTGGGACTTCGACTGCTGAGCGCCGGGCGT
AGAACAAGATGACCACCAGCAGTGAGGACGTGCTGCTCCAGATGGGCG
AGGTGCGGTACAAGAAGGGCGACGGCACGCTCTACGTAATGAATGAGC
GTGTGGCCTGGATGGCGGAACACCGGGACACGGTAACAGTCTCCCATCG
TTATGCGGATATCAAGACTCAAAAGATATCTCCTGAGGGCAAGCCCAAG
GTGCAGCTGCAAGTGGTTCTTCACGACGGCAACACATCGACCTTCCACTT
CGTCAACCGCCAGGGACAGGCCGCAATGCTTGCCGACAGGGACAAGGT
CAAGGAGCTATTGCAGCAACTGCTTCCCAACTTCAAGCGGAAGGTGGAC
AAAGACCTGGAAGACAAGAACCGCATCCTTGTTGAGAATCCCAACCTGC
TGCAACTCTACAAGGACCTTGTCATAACCAAAGTCCTAACCAGCGATGA
GTTCTGGGCTACGCATGCCAAGGATCACGCCCTTAAGAAAATGGGCAGA
TCCCAGGAGATCGGTATAGGTGTTTCTGGCGCCTTTCTGGCTGACATAAA
GCCGCAGACAGACGGCTGTAATGGCCTCAAGTACAACCTCACCTCTGAT
GTGATTCACTGCATTTTCAAGACCTATCCCGCCGTTAAACGCAAACATTT
TGAGAATGTGCCTGCCAAAATGTCCGAGGCCGAGTTTTGGACCAAGTTT
TTCCAATCACACTACTTTCATCGTGACAGACTGACAGCCGGCACAAAGG
ACATATTCACGGAGTGCGGCAAGATCGATGACCAAGCATTAAAAGCGGC
TGTTCAGCAGGGAGCTGGTGATCCTTTGCTAGACCTTAAAAAGTTTGAG
GATGTTCCTTTGGAAGAGGGCTTTGGCAGCGTAGCAGGGGACCGCAACG
TCGTGAACAGCGGGAATATTGTGCACCAAAACATGATCAAGCGATTCAA
TCAGCATTCCATCATGGTGCTTAAGACCTGTGCTAACGTGACCTCAGCGC
CGTCAACTATGACCAATGGTACCAATAATGCCAACGGGCCTGTTTCCCA
ATCCGCGTATACGAACGGGATGAATGGAAAGGGCCAGGCCACGGCCAC
CGCGACGAAGAGTTCCTCCGATCAGGTGGACAAAGACGAGCCGCAGAG
CAAAAAGCAACGACTGATGGAAAAGATTCACTATGTGGATCTCGGGGAC
CCTATATTGGAGGGAGATGATTCCGCCAACGGCGAGAAAGCCAAGTCTA
AGCACTTCGAACTGTCCAAAGTGGAGCGTTACCTCAATGGCCCTGTCCA
GAACAGCATGTACGACAACCACAACGATCCAATGAGTCTTGAAGAGGTG
CAGTACAAGCTGGTGCGGAATTCGGAGTCATGGCTAAACCGCAACGTGC
AACGAACGTTCATCTGTTCTAAGGCGGCAGTAAATGCTCTGGGTGAACT
AAGTCCTGGCGGTTCCATGATGCGCGGTTTCCAAGAGCAGTCAGCGGGA
CAACTTGTTCCGAACGACTTCCAACGAGAGCTGCGCCACTTATACCTTTC
GCTGTCCGAGCTGCTGAAACACTTTTGGAGCTGCTTTCCGCCCACCTCAG
AAGAGCTGGAGACAAAGTTACAGCGTATGCACGAGACGTTGCAGCGCTT
CAAAATGGCCAAACTAGTGCCTTTTGAGGTGAGTTFFTACAAACCGCGCT
ATGCACGAACTTTCGCCACTGCGATCCTCGCTGACGCAGCACTTGAATC
AGCTGCTGCGCACCGCCAACAGCAAGTTCGCAACTTGGAAGGAGCGAA
AACTGCGCAACACCAGGTAG
>CG8151|FBgn0033929
MTTSSEDVLLQMGEVRYKKGDGTLYVMNERVAWMAEHRDTVTVSHRYA
DIKTQKISPEGRPKVQLQVVLHDGNTSTFHFVNRQGQAAMLADRDKVKELL
QQLLPNFKRKVDKDLEDKNRILVENPNLLQLYKDLVITKVLTSDEFWATHA
KDHALKKMGRSQEIGIGVSGAFLADIKYQTDGCNGLKYNLTSDVIHCIFKTY
PAVKRKLHFENVPAKMSEAEFWTKFFQSHYFHRDRLTAGTKDIFTECGKIDD
QALKAAVQQGAGDPLLDLKRFEDVPLEEGFGSVAGDRNVVNSGNIVHQNM
IKRFNQHSIMVLKTCANVTSAPSTMTNGTNNANGPVSQSAYTNGMNGKGQ
ATATATKSSSDQVDKDEPQSKKQRLMEKIHYVDLGDPILEGDDSANGEKAK
SKIHFELSKVERYLNGPVQNSMYDNHNDPMSLEEVQYKIVRNSESWLNRNV
QRTFICSKAAVNALGELSPGGSMMRGFQEQSAGQLVPNDFQRELRHLYLSL
SELLKIIFWSCFPPTSEELETKLQRMHETLQRFKMAKLVPFEVSFTNRAMHEL
SPLRSSLTQHLNQLLRTANSKFATWKERKLRNTR
C>>G13941|FBgn0033928|cDNA sequence
ATGACGCAGATGTCCGACGAACAGTTTCGCATATTCATAGAAACCATTA
AATCGCTGGGGCCAATCAAAGAGGAACCGCCATCCAAGGGTAGCTTTAG
CAACTGCACGGTGAGATTCAGTGGCCAGCGGGATCACGATGCCGTGGAC
GAGTTCATCAATGCCGTGGAGACGTATAAAGAGGTGGAGGGCATCAGCG
ACAAGGATGCGCTAAAGGGTTTGCCGCTGCTCTTCAAGAGCATTGCCGT
GGTGTGGTGGAAGGGTGTGCGCCGGGATGCCAAGACCTGGTCGGATGCC
CTGCAGCTGCTGCGCGATCACTTCTCGCCCACTAAACCTTCCTACCAGAT
ATACATGGAGATCTTCGAGACGAAGCAGTCCTACGACGAAGTGATCGAC
TCATTCATCTGCAAGCAGCGAGCGCTCCTAGCCAAGTTGCCGGAGGGAC
GACACGACGAGGAGACGGAGCTGGACTTCATCTACGGGCTGATGCAGGC
CAAGTACCGGGAGAGCATACCCCGACACGAGGTCAAAACCTTCCGGGA
GCTACTCGATCGGGGGCGAACTGTGGAGCGCACAAGGCACTGA
>CG13941|FBgn0033928
MTQMSDEQFRIFIETIKSLGPIKEEPPSKGSFSNCTVRFSGQRDHDAVDEFINA
VETYKEVEGISDRDALKGLPLLFKSIAVVWWKGVRRDAKTWSDALQLLRD
HFSPTKPSYQIYMEIFBTKQSYDEVIDSFICKQRALLAKLPEGRLIDEETELDFI
YGLMQPKYRESIPRHEVKTFRELLDRGRTVERTRH
Scim26
AE003815 (insertion @33900), nearest ORF (CG13942) @36413
The EST GH23043 has 94% identity with CG8603 gene product: 3′end is at 17162
>>CG13942|FBgn0033922|cDNA sequence
ATGCAACATCGATTTCTCTTGCAGGATGACCTGCCGCACCACAACAGCA
GCAGCAGCCAGCTGGGCCAGCAACACGGCTCATCGTTGGACCAGTGCGG
ATTGACTCAGGCCGGCCTCGAGGAGTACAATAATAGATCGTCCTCGTAC
TACGACCAGACGGCCTTCCATCACCAGAAGCAGCCATCCTATGCCCAAT
CCGAGGGCTACCACAGCTATGTGTCAAGTTCGGATTCCACATCGGCCAC
GCCATTTCTGGATAAATTACGTCAGGAGAGCGATCTGCTGTCGCGCCAA
TCGCATCATTGGTCGGAGAACGATCTGTCCTCCGTTTGCAGCAACTCTGT
GGCGCCTTCGCCCATTCCGCTGTTGGCCCGTCAGTCTCACTCCCACTCTC
ATTCTCACGCGCATTCCCATTCGAACTCCCATGGCCATTCCCACGGTCAC
GCCCACTCAGCCTCCTCATCCTCATCCAGCAACAACAATAGCAACGGCA
GCGCCACCAACAACAACAACAACAACAGCTCGGAAAGCACTTCCTCCAC
GGAAACCCTCAAGTGGCTGGGCTCCATGAGCGATATATCCGAAGCCAGT
CATGCAACCGGCTACAGCGCCATCTCCGAATCGGTTTCCTCCTCGCAGCG
CATTGTCCACAGTTCCCGGGTGCCGACACCCAAGCGTCATCATAGCGAG
AGCGTGCTGTATCTGCACAACAACGAGGAGCAAGGCGACAGCTCGCCCA
CTGCGAGCAACTCCTCGCAGATGATGATCTCCGAGGAGGCGAATGGCGA
GGAATCGCCGCCGTCGGTGCAGCCACTTCGCATCCAGCACCGTCACAGT
CCCAGCTATCCGCCCGTGCACACCTCGATGGTGCTGCACCACTTTCAGCA
GCAGCAGCAGCAGCAGCAGGATTACCAGCACCCGAGTCGCCACCACAC
CAACCAGTCCACGTTGAGCACACAAAGTTCCCTGCTGGAGCTGGCCTCG
CCCACGGAGAAACCTCGCTCCCTCATGGGACAATCCCACTCCATGGGCG
ACCTGCAGCAAAAGAATCCGCATCAGAATCCGATGTTGGGACGATCGGC
TGGTCAGCAGCACAAGTCCAGCATTTCCGTGACCATTTCCAGCAGCGAG
GCCGTGGTCACCATTGCACCACAACCGCCAGCTGGTAAGCCCAGCAAGC
TGCAGTTGTCCCTGGGAAAGTCGGAGGCCCTCAGTTGCAGTACACCCAA
TATGGGGGAGCAGAGTCCCACGAACAGCATCGATTCCTACCGCAGCAAC
CATCGCCTGTTCCCGGTGAGCACCTACACGGAGCCGGTGCACAGCAACA
CCTCGCAGTACGTGCAGCATCCCAAGCCGCAGTTCAGCTCCGGGCTGCA
CAAGTCCGCCAAACTTCCTGTGATAACGCCAGCGGGGGCCACAGTGCAG
CCCACCTGGCACTCGGTGGCCGAGAGGATTAACGACTTTGAGCGCAGTC
AGTTGGGGGAGCCACCGAAGTTTGCCTACCTGGAGCCCACCAAGACGCA
CCGCCTCTCGAATCCGGCTCTAAAGGCTCTCCAGAAGAACGCAGTGCAG
TCCTATGTGGAACGACAGCAGCAGCAGCAGAAGGAGGAACAGCAGCTA
CTACGTCCGCACTCGCAATCCTACCAAGCGTGTCATGTGGAGCGCAAAT
CACTGCCGAACAACTTGAGTCCCATAATGGTGGGTCTGCCCACTGGGAG
TAACTCCGCATCGACTCGGGACTGCAGTTCACCCACTCCACCACCACCG
CCACGACGTTCGGGGAGTCTGCTGCCCAATCTGCTAAGGCGCTCCAGTT
CGGCCTCGGACTACGCGGAGTTCAGGGAGCTGCATCAGGCACAGGGTCA
GGTCAAGGGACCGAGCATTAGGAACATAAGCAATGCCGAGAAAATCTC
CTTCAATGACTGCGGAATGCCACCTCCGCCGCCGCCACCACGAGGACGT
TTGGCCGTGCCGACCAGACGCACATCCTCGGCAACGGAATACGCACCCA
TGCGGGACAAACTGCTGTTGCAGCAGGCCGCCGCCTTGGCCCACCAGCA
GCACCACCCGCAGCAGCATCGCCATGCCCAACCGCCCCATGTGCCGCCC
GAGCGTCCGCCCAAGCATCCCAATCTTCGGGTGCCGTCGCCTGAGCTGC
CACCGCCGCCGCAGAGTGAACTTGACATCAGTTATACCTTCGATGAGCC
ATTGCCGCCGCCACCGCCGCCGGAAGTGCTCCAGCCACGCCCACCGCCC
TCGCCCAACCGGCGGAATTGCTTCGCCGGAGCATCCACACGTCGCACCA
CCTACGAAGCACCACCGCCCACCGCAATTGTCGCCGCCAAGGTGCCACC
GCTGGTGCCCAAGAAGCCAACGAGCTTGCAGCACAAGCATCTCGCCAAC
GGAGGAGGCGGCAGTCGCAAGCGCCCGCACCACGCGACTCCACAGCCC
ATCCTCGAAAATGTGGCCAGTCCCGTGGCGCCACCGCCGCCCCTGTTGC
CGCGTGCCAGATCCACCGCCCATGACAATGTGATTGCCAGCAATCTGGA
GAGCAACCAGCAGAAACGGTGA
>CG13942|FBgn0033922
MQHRFLLQDDLPHHNSSSSQLGQQHGSSLDQCGLTQAGLEEYNNRSSSYYD
QTAFHHQKQPSYAQSEGYHSYVSSSDSTSATPFLDKLRQESDLLSRQSHHW
SENDLSSVCSNSVAPSPIPLLARQSHSHSHSHAHSHSNSHGHSHGHAHSASSS
SSSNNNSNGSATNNNNNNSSESTSSTETLKWLGSMSDISEASHATGYSAISES
VSSSQRIVHSSRVPTPKRHHSESVLYLHNNEEQGDSSPTASNSSQMMISEEA
NGEESPPSVQPLRIQHRHSPSYPPVHTSMVLHHFQQQQQQQQDYQHPSRHH
TNQSTLSTQSSLLELASPTEKPRSLMGQSHSMGDLQQKNPHQNPMLGRSAG
QQHKSSISVTISSSEAVVTIAPQPPAGKPSKLQLSLGKSEALSCSTPNMGBQSP
TNSIDSYRSNHRLFPVSTYTEPVHSNTSQYVQHPKPQFSSGLHKSAKLPVITP
AGATVQPTWHSVAERINDFERSQLGEPPKFAYLEPTKTHRLSNPALKALQK
NAVQSYVERQQQQQKEEQQLLRPHSQSYQACHVERKSLPNNLSPIMVGLPT
GSNSASTRDCSSPTPPPPPRRSGSLLPNLLRRSSSASDYAEFRELHQAQGQVK
GPSIRNISNAEKISFNDCGMPPPPPPPRGRLAVPTRRTSSATEYAPMRDKLLL
QQAAALAHQQHHPQQHRHAQPPHVPPERPPKHPNLRVPSPELPPPPQSELDI
SYTFDEPLPPPPPPEVLQPRPPPSPNRRNCFAGASTRRTTYEAPPPTAIVAAKV
PPLVPKKPTSLQHKHLANGGGGSRKRPHHATPQPILENVASPVAPPPPLLPR
ARSTAHDNVIASNLESNQQRR
>>CG8603|FBgn0033923|cDNA sequence
ATGAGACGTGCGATTCGGGCAATATTTTCGGTGCTTTTGGCTTTTGTCCT
CAAGTCGTGGCGGTTACTGCCGATGACCCCATCGAATTCCAAGGCCTCA
TACTTGCCGCGTCAGAGTCTGGAGAAGTTGAACAACACTGATCCCGACC
ATGGCATATACAAGCTCACCCTGACCTCCAACGAGGACTTGGTGGCCCA
CACGAAGCCCAGCTATGGGGTCACAGGAAAGCTGCCCAACAATCTGCCG
GATGTCCTGCCGCTGGGCGTTAAGCTCCACCAGCAGCCAAAGTTGCAGC
CAGGATCGCCGAACGGCGATGCGAATGTGACCCTGCGCTATGGCTCCAA
CAACAATCTGACTGGGAATTCCCCGACGGTTGCCCCGCCCCCCTACTATG
GGGGCGGCCAGCGGTATTCAACTCCTGTGCTGGGTCAAGGTTACGGCAA
AAGTTCGAAGCCCGTGACCCCGCAACAATATACGAGATCTCAGTCGTAC
GATGTGAAGCACACTAGTGCGGTGACTATGCCGACAATGTCCCAGTCCC
ACGTGGATCTCAAGCAGGCCGCCCATGACCTAGAGACGACGCTGGAGG
AGGTGCTGCCCACTGCCACGCCCACGCCGACGCCAACACCGACGCCCAC
ACCGCCACGCCTCTCGCCGGCTTCCTCGCACTCGGACTGCAGTCTGAGC
ACCAGTTCCTTGGAGTGCACAATCAATCCTATAGCGACACCGATTCCTA
AGCCTGAGGCGCACATCTTTCGCGCCGAGGTGATTAGCACCACCCTGAA
CACAAATCCGTTGACAACACCGCCCAAGCCCGCGATGAACCGCCAGGAA
TCCCTGAGGGAGAACATCGAAAAGATCACCCAACTACAGTCGGTGCTGA
TGTCGGCGCACCTGTGTGATGCGAGTCTACTAGGTGGTTACACCACTCCA
CTGATAACCAGTCCCACTGCCAGTTTCGCTAACGAACCACTAATGACAC
CACCACTGCCGCCCAGTCCGCCACCGCCACTAGAACCGGAGGAGGAGG
AGGAGCAGGAGGAGAACGATGTGCACGACAAGCAGCCAGAGATCGAGG
AACTGCAGCTGATGCAGCGCAGCGAATTGGTCCTAATGGTGAATCCCAA
GCCGAGCACAACGGATATGGCCTGCCAAACGGACGAGCTGGAGGACAG
GGACACGGACCTCGAAGCGGCACGCGAGGAGCACCAGACTAGAACGAC
TCTGCAGCCGCGACAGCGCCAGCCCATCGAGCTGGACTACGAGCAGATG
AGCCGGGAGCTGGTTAAGCTCCTACCGCCTGGTGACAAGATCGCCGACA
TCCTCACACCAAAGATCTGCAAGCCCACCTCGCAATACGTTAGCAATCT
GTACAATCCGGATGTGCCACTGCGCTTGGCCAAGCGCGATGTTGGCACC
TCTACGTTGATGCGAATGAAGTCCATCACGTCGTCTGCCGAGATCCGAG
TGGTCAGTGTGGAGCTGCAGCTGGCAGAGCCGAGCGAGGAGCCGACGA
ATTTAATCAAGCAAAAGATGGATGAGCTCATCAAGCATTTGAACCAAAA
AATTGTCTCCCTGAAACGCGAGCAGCAGACGATCAGCGAGGAGTGCTCG
GCCAATGACAGACTGGGCCAGGATCTATTCGCCAAGCTAGCGGAGAAG
GTTCGACCCAGCGAAGCCTCCAAGTTCCGTACCCATGTCGACGCCGTGG
GCAACATAACCAGTTTACTTCTGTCGCTTTCCGAGCGTTTGGCCCAAACC
GAAAGCAGCCTGGAAACGCGCCAGCAGGAAAGGGGCGCGCTGGAATCA
AAGCGGGATCTGCTGTACGAGCAGATGGAGGAGGCGCAGCGTCTCAAAT
CGGACATAGAACGACGTGGAGTCAGCATCGCCGGATTACTGGCCAAGA
ACCTCAGCGCGGACATGTGCGCCGACTACGACTACTTCATCAACATGAA
GGCCAAGCTGATCGCCGATGCACGCGACCTGGCCGTAAGGATCAAGGGC
AGCGAGGAGCAGCTTAGCTCCCTCAGCGATGCGCTAGTCCAAAGCGATT
GTTAG
>CG8603|FBgn0033923
MRRAIRAIFSVLLAFVLKSWRLLPMTPSNSKASYLPRQSLEKLNNTDPDH
GIYKLTLTSNEDLVAHTKPSYGVTGKLPNNLPDVLPLGVKLHQQPKLQPG
SPNGDANVTLRYGSNNNLTGNSPTVAPPPYYGGGQRYSTPVLGQGYGKSS
KIPVTPQQYTRSQSYDVKHTSAVTMPTMSQSHVDLKQAAHDLETTLEEVLP
TATPTPTPTPTPTPPRLSPASSHSDCSLSTSSLECTINPIATPIPKPEAH
IFRAEVISTTLNTNPLTTPPKPAMNRQESLRENIEKITQLQSVLMSAHLC
DASLLGGYTTPLITSPTASFANEPLMTPPLPPSPPPPLEPEEEBEQEEND
VHDKQPEIEELQLMQRSELVLMVNPKPSTTDMACQTDELEDRDTDLEAAR
EEHQTRTTLQPRQRQPIELDYEQMSRELVKLLPPGDKIADILTPKICKPT
SQYVSNLYNPDVPLRLAKRDVGTSTLMRKSITSSAEIRVVSVELQLAEP
SEEPTNLIKQKMDELIKHLNQKIVSLKREQQTISEECSANDRLGQDLFAK
LAEKVRPSEASKFRTHVDAVGNITSLLLSLSERLAQTESSLETRQQERGA
LESKRDLLYEQMEEAQRLKSDIERRGVSIAGLLAKNLSADMCADYDYFIN
MKAKLIADARDLAVRIKGSEEQLSSLSDALVQSDC
Scim27
AE003803 (insertion @144410), nearest ORF (CG10939) from 133835 to 144393
C#553: GH04176 98% identity with CG10939 gene product
>>CG10939|FBgn0034209|cDNA sequence
CGAAAGCGTTAACAACGTTTCAACGGATCTTCAGCGTGTGAGATAATAT
TACATACGTAGAAATAATATCAGGAAGGCAGCAGCAACAGCAGCAAAA
ACAACGCGAGTAGCCCTCTCTCTGCGCCTCTTTCGCCTGTCAACAGTTAT
TTTAGCCGATTGTTTTGTGTGACTTTTTCGTGTGCTGTTCGCTTTCGTTTC
GTTTAGCTGTTCGGCAACTCCTTCATTTCATTAAAAATAGTAAGGCCTTG
TAACAACAACAACAAGAACGACGACGTGTTTATGTGTGTGTATGTGACA
GCGTTTGCATACGGAAAAGAGTAGAGAGTGCAACAATAATAACTGCAAC
AAAAACAGAAAACTGAAAATCAACAGCAACATTTGAAAGGGAATCGTT
TCTACTTGTTTGTTTAAGCGAAGTCAAGATGTCCACGCCCACTTCCCCGA
AGACGCCCACACCGCCCACTTTGCCACCGGGCGTGACCAAAACATGTCA
CATTGTGAAAAGGCCCGATTTCGATGGCTATGGTTTCAATTTGCATTCGG
AGAAGGTGAAACCAGGACAGTTTATTGGCAAAAGTAGATGCGGMTTCTCC
GGCAGAGGCAGCCGGCCTGAAGGAGGGCGATCGCATCCTGGAGGTCAA
CGGGGTGTCCATTGGCAGCGAGACCCACAAGCAGGTGGTTGCCAGGATC
AAGGCCATTGCGAATGAAGTCCGCTTGCTGCTCATCGATGTGGATGGCA
AGGCCTTGGAGGTGAAACCGGCATCTCCGCCAGCCGCTGCGTGCAATGG
AAACGGTAGTGCCAGTCAGAATGGATACGAGGGCACCAAACAGGAGAT
GCCCGGAGCAAGTGCCAATATCAGTAGCATCAGTATGGTGAGCACCAG
CGATCCTCAAATGCCAGCAGCATTCAGAGCGGCAGTACCATGAATGCCT
CCGATTTGGATGTGGTCGATAGGGGAATACCGGCAGTCGCTGCTCCGGT
GGCTATCACCCCGCCTCCCGTTCAAAATGGAAGTAAACCCTCATCGCCG
ATTAATAATAACACTTTGATGAGCACACCGCCACCGCCGTCCGCTACTA
AGGCTGGCATCAACAACAATGGCAGTGTTTATAACACCAATGGAAATGG
TACAAATGGCATGACCACACCCACTACACCACCCCCACCGACCAGTGGC
TATAAGGCGGGCACCTTGCATTTACCAATGACGGCCGCCGAAATGCGCG
CCAAATTGGCATCCAAGAAGAAGTACGATCCCAAGAACGAGAGTGTGG
ACCTCAAGAAGAAGTTCGACATCATTCAGAAGCTCTGAGACGAAAAGGG
TAGCCCAACCAACTACTTGTTATAATGTCAGGATGAGGAGCTAGAGCTG
GTTTTGTCAGGCATACACCACACCACACAATATACAATATGTTTAGCTAT
TAGTACGAAGAGTCACTTATTAACTAAGCAAGTTTTTAATTATTACCCCC
TAAGAGAAAGAGCGACCAACGATGGTAGAGTAAACGGATATGATGGAG
CACCTACCCTTGGAATATCTATACATTGTACGACATACGCGTATTCTTCA
AATTCAAATATTGCAAACTCCGATTGGCAATGTTGCCCTGGTTCATTGAA
CAACTTTCATTGAATATGTACTTAGTTTTGCTTGTATTTTTGTAAAGTAAA
TAAAGCAAAAATATAAAAGAAATAC
>CG10939|FBgn0034209
MSTPTSPKTPTPPTLPPGVTKTCHIVKRPDFDGYGFNLHSEKVKPGQFIG
KVDADSPAEAAGLKEGDRILEVNGVSIGSETHKQVVARIKAIANEVRLLL
IDVDGKALEVKPASPPAAACNGNGSASQNGYEGTKQEMPGASANISSISM
VSTRRSSNASSIQSGSTMNASDLDVVDRGIPAVAAPVAITPPPVQNGSKY
SSPINNNTLMSTPPPPSATKAGINNNGSVYNTNGNGTNGMTTPTTPPPPT
SGYRAGTLHLPMTAAEMRAKLASKZKAQYDPKNESVDLKKKFDIIQKI
CG6568 is closeby on the opposite strand
>>CG6568|FBgn0034210|cDNA sequence
ATGAAGAGAGCAGCAACAACAAAGATGACTGGAGCCACGGCTGCGGGA
GCAACAACAACAACATCGTCAACAGGTGCAGTGGGATATCCCGTTCTCA
AAACACCCAAGTATGTGGTTCAGACTAGTCCGAGTGGATCCTCTGGCCA
TCAGCTCCAGATGCTGGCGAGGAAGGACACTCAAAGTCTGGGAGTGGCC
ATCAATTCACTGCCGCCCAACACAATCATCAAAGCAACCACAAGACCTT
CACAAACAGCGCCTTTGACACCAAACTCAGCGGCTGTCACGCCAAGCAC
GCCGAGCAGTAGCAGGAATTCCACTCAGTCCACACCAACTGTGGTACCT
GATGCGAGAGTTTCCTCCGCCGTGCGCCAAGCTGTGTTCATCAAGAGGG
AGCTACCCCAGCCGCAGAGGAGCATGCGAAATATGACACTTGGTTTGGT
GGAACAGGCGCCACTGCTTCATTTGGGTGTTGCGCCACAGCACCTGTCA
CTGCTGAAACGCCATATCTGCCGCAATGCTAATGTCACCCACTTGGACTG
TGCTTGACTCTAAGGAAACTCAAACAAAACGAGCACTTCGCCCTGTTG
GCCGAGCACTTGAGCTGAGCGAATCAGATGTCGAGGACACATTTAAGC
GCACCCTTATCAAGCTGGCCCGTTACCTCCGTCCACTGATTCGTTGGCCA
GATGCACGGCATCACAACGAGCGCTTCAAACATACCCCACTGAACTACC
GAGCCAACCTGTTGCATGTACGCTCGTTGATCGAGTGTGTGGAAACGGA
CGTGCCGATAGATCTGGGATTGGGCAGCGGCAGCTATAAGTTCATATTG
TGCATCAATACAAATGGCATCATCAGCTATGTGTCTAGCGCCTTTCCTGG
TAGTTGCGATGATCTTCAATTGTTTGAGGCCAGCAGATTTCGGGATGTCA
TTCCCAATTACCTAACACTATGCGCGGAACCAGGCKAAGCAGTACGCCG
TGCTCGCAGGTCGGGCTTCGGAGATCCTCACGACTCAGCGGATGAGGAT
GAGGCGGCGGCGGAACCAAAGCGATCACTTACCAAATTCGAGGCACAG
CGTTTGAGTGGCCAGCTAGCAAGCCAGCAATCCCTATCCGTTGTAGACG
GAGCACTGACTTCCAAGCGGGCTCCAGCGATTCAACTACCCACATTCAA
CGCACAAGAACCCGCCTGTAGAGCCCAAATGAGAGATATGATAGATTAT
TTAAGGGAATTCCGCATGCTGGATAATTCGGCTATTAAGCAAAAGTCAT
TGCTGGGTTATCTTGATGAAATGATCGTGGTGGCTGCGGGTCTATGCAAC
CTTAAGCGCCAAGAGTFfGGAATCTTAA
>CG6568|FBgn0034210
MKRAATTKMTGATAAGATTTTSSTGAVGYPVLKTPKYVVQTSPSGSSGHQ
LQMLARKDTQSLGVAINSLPPNTIIKATTRPSQTAPLTPNSAAVTPSTPS
SSRNSTQSTPTVVPDARVSSAVRQAVFIKRELPQPQRSMRNMTLGLVEQA
PLLHLGVAPQHLSLLKRHICRNANVTHLDCCLTLRKLKQNEHFALLAEHF
BLSESDVEDTFKRTLIKLARYLRPLIRWPDARHHNERFKHTPLNYRANLL
HVRSLIECVETDVPIDLGLGSGSYKEILCINTNGIISYVSSAFPGSCDDL
QLFEASRFRDVIPNYLTLCAEPGKAVRRARRSGFGDPHDSADEDEAAAEP
KRSLTKFEAQRLSGQLASQQSLSVVDGALTSKRAPAIQLPTFNAQEPACR
AQMRDMIDYLREFRMLDNSAIKQKSLLGYLDEMIVVAAGLCNLKRQELES
Scim28
AE003791 (insertion @81960), nearest ORF (CG13438) @86768 (5 kb away)
>>CG13438|FBgn0034545|cDNA sequence
ATGAAGTCGTTCGGGAACTTGACCTTTGGCCTACTCGTCATCCTTATAGC
AAGCTTTACTGTCGGCCTAGAGGCTCGTCGCCTGGCTTTGCGTCCATTGA
CAGGAAGGGAACTGAGAAGAGCTCTTAGGGAATCCGGATTCGATGAGGAT
TCTGCAGCTGGAAGATCAGTGGCGTCGGCGCTGTCCGGACTCAGTGGATT
CGCCCTGGGCATCACAAAGGGCATTGGTGGCTCACTGCTGTTCGATGTGG
TCACCTCGAATGTGACCATTGATTACATTACCAGTCTGCTGAACTCCACT
GCCTCATCGTCGACTTCAAGCAGCAGTGGAACTGCACAGGAGATCTGTTT
CAACAGTCGCAGTGCCGACGGTGAGGTGATTAACGGCAGGAGTAATGGCT
TCAATGACATGGATGATGGAGCAGATCTCGACGGCGAGTGGAGACAGACT
ACCAGTGGCACGGGCACGGGCTCTGTTACTGGCACTGGCACTGAGACAGG
AACTACCACCTCCTCGTCTTCCAACGGCCTCACCTGCATTGTCCTGAGCA
AGGAGGGTTCCCGTCGCAGGCGCCAGTTGCGAATCCAACCAGGAACGTTG
AGATCTGTTTATCCTAAAAGCCATCGGCAGACCCTGAAAAAGTACCGCCG
GCATAGGGTTTAG
>CG13438|FBgn0034545
MKSFGNLTFGLLVILIASFTVGLEARRLALRPLTGRELRRALRESGFDED
SAAGRSVASALSGLSGFALGITKGIGGSLLFDVVTSNVTIDYITSLLNST
ASSSTSSSSGTAQEICFNSRSADGEVINGRSNGFNDMDDGADLDGEWRQT
TSGTGTGSVTGTGTETGTTTSSSSNGLTCIVLSKEGSRRRRQLRIQPGTL
RSVYPKSHRQTLKKYRRHRV
Scim29
AE003458 (insertion @65550), CG2852: 64150 to 65533, CG13513 @65905
Cit#2921, Cit#5587—cyclophilin—this is very “busy”region with many loci.
>>CG2852|FBgn0034753|cDNA sequence
TGGCGACGTCGCTTGAGGAATAAACTGAAGCGCTGTGAATATTTAGAACG
ATGAAGCTGTTCTTATCCGTTTTCGTGGTAGCCCTGGTGGCCGGCGTCGT
TGTTGCCGACGATAGCAAGGGTCCCAAAGTGACCGAGAAGGTTTTCTTTG
ACATCACCATTGGCGGCGAGCCCGCTGGTCGCATCGAGATCGGTCTGTTC
GGCAAGACGGTGCCCAAGACGGTGGAGAACTTCAAGGAGCTGGCGCTGAA
GCCGCAGGGCGAGGGCTACAAGGGCAGCAAGTTCCACCGCATCATCAAGG
ACTTCATGATCCAGGGCGGTGACTTCACCAAGGGCGACGGCACCGGCGGT
CGCTCCATCTACGGCGAGCGCTTCGAGGATGAGAACTTCAAGCTGAAGCA
CTATGGCGCCGGCTGGCTGAGCATGGCCAACGCTGGCAAGGACACCAACG
GATCGCAGTTCTTCATCACCACCAAGCAGACCAGCTGGCTGGATGGACGC
CACGTCGTCTTCGGCAAGATCCTGTCGGGCATGAATGTGGTGCGCCAGAT
CGAGAACTCGGCCACTGATGCCCGCGACCGTCCCGTCAAGGATGTGGTCA
TCGCCAACAGCGGCACCCTGCCCGTTTCGGAGGCCTTCTCCGTGGCCAAG
GCCGATGCCACCGACTAAAGTGTTTGGGGAGCATGTCATCCATCAGCAAC
ATAACCGATTTGAACTAAGCATAAACGCATAATCGATTTTTCCAGACATT
TGCATTTACCATAGCTCGCCATGTTTATTACATTTCGTTCCGTAAGCAA
GTAATTGTGCTCAACTAAAAACAGAAATGGCATAAATAAAGAATGATTTT
TTGTGTGATAAA
>CG2852|FBgn0034753
MKLFLSVFVVALVAGVVVADDSKGPKVTEKVFFDITIGGEPAGRIEIGLF
GKTVPKTVENFKELALKPQGEGYKGSKFHRIIKDFMIQGGDFTKGDGTGG
RSIYGERFEDENFKIKHYGAGWLSMANAGKDTNGSQFFITTKQTSWLDGR
HVVFGKILSGMNVVRQIENSATDARDRPVKDVVIANSGTLPVSEAFSVAK
ADATD
>>CG13513|FBgn0034754|cDNA sequence
ATGACGACAACGCTGCCGGAGAAGGAAGCGGAAACGCAGCAGGAGATCAG
GGAGCGGGAGGCCAAGGCTCTGGAGGACCGAAAGGAGCGCAAGATCTACG
AGAACTTTGCCACGCCCCTGGCAGGCACTTTTCTCAACCTGCCACGCGAG
CCCGTGGAGATCGAGTGCCCCGCCTGCGGAATCAAGGATCTGAGTGTGGT
GCAAAATGATCTGAAGTGGTGGGCCAGTGAACTAAACCGCATTCCTCAGT
CTGCGTTTGTTTTTAAAGCAGTCAACATCTTTCGGTGCGAAATGGCTCAG
GATCCGAAACCACTTTACTTTGCCGTGGGCCCCGGCCCCAACGACATTAC
GTGTCCTTATTGCAGGACCAAGGCCAAGACCCGTGTGGTGCGTTCCTGGC
TGCGTTGCTGCACCAAGAGGCATCACTGCGGTGCCTGCGGGGAGTACCTG
GGCTCACCGATCGTTCTCGCTGGAACTCGCATCATGACCGTGGACGAACC
GCAGATTGTGGCCATCATTGTCAGCCACAAGCCACAAGTGGGATACCTGA
AGGAGGAGCCCACCTGGATCCGTTGTCCTTCGTGTGAGAAGTCTGGAACC
AGTTTGGTGCAACTGGAGTTGGTCACTTGCCTGCAGAGATTTCTGGGATT
CACAAAACTTTGTAAAAAATGGTCTGGCCGCCAGGACATCAATCACTATT
GTTCACACTGCGGTTGCTTCATTGGAAGATTTGTGCCCATCAGCTGCATG
GAACGATGCATTTCGAGATCAGCCCGTAAACAGGCGGCCGTGGATGATAT
GACCCTGAAGACACGACCCAAGGATTGCGCTGAAAGGGCCCAGAAATCCA
GGGAGAAAGTTCTGGCCAGCAGGGAGAAGAAGAGAGCAGAGAAGGCAGCC
AAGGATATGGACAAATCTCAGACGCAAATAGCAGTACACCAATAA
>CG13513|FBgn0034754
MTTTLPEKEAETQQEIREREAKALEDRKERKIYENFATPLAGTFLNLPRE
PVEIECPACGIKDLSVVQNDLKWWASELNRIPQSAFVFKAVNIFRCEMAQ
DPKPLYFAVGPGPNDITCPYCRTKAKTRVVRSWLRCCTKRHHCGACGEYL
GSPIVLAGTRIMTVDEPQIVAIIVSHKPQVGYLKEEPTWIRCPSCEKSGT
SLVQLELVTCLQRFLGFTKLCKKWSGRQDINHYCSHCGCFIGRFVPISCM
ERCISRSARKQAAVDDMTLKTRPKDCAERAQKSREKVLASREKKRAEKAA
RDMDKSQTQIAVHQ
Scim30
AE003676 (insertion @173210), CG17816 150150 to 173151, CG10092 @173697
C#3179: LP03266 98% identity with CG17816 gene product
>>CG17816|FBgn0037525|cDNA sequence
CCAGAAAAGAGCCATAGCATATTCTCACAGCTACATATACATATGAGCAG
GCAGCAGCAGCAGCAGTAGCAGCGGCAGAGAGAAAATCGGTTCAATCTTG
AAAAGTGTGTTTCCCAGTGCTTCACCTGAAGTTTTTTGGCACTACCTTGC
CTTACCAGAGTAAGCGGAAGTCAATTTGGCCTATGACAATACAAACGCAC
TTTCTTCGCTACGCATTGTCCAGGTGCGTGTGCGTATAGAGAGAGCGAGC
GAGAGGTGAAATATTTAGGTTTAAAGGCCAGGCGCGTGTGTGTGACCCAT
GAAAAGTTGTTAAACATAAGCAACGTCAATCGCCGCTGATCGAAAGAAGA
GAAACCCCTACGCGCGCGTGTTTAATTTGTATTTTTGGCACTTTGGTTGG
CAAACAGCAAAAGCATTTCCCTATGATTGGCTCATTCTGGAATCTGTGCA
GAGCGTGCCCATCAATGCCGGTAGACAAGCTCCACTCGGAGTATCGGAGC
ACTTATCGCTGGCATGAATTTACGGGCAACTCGCGGCCAGAGGTTGTGCG
ACGGGCGCCTGCCCCAAACCCAAGTCAATTTGTTGGAGCGACAAATGAGC
CGCCATTGCCACGCCGGAAAAAATGTCCAGAATTAGCATATAAATCGCAC
GAGTTTATTATAGGATCGGAGTATACAGATGGACGCCGAGATGCCAGTGC
ACATCGTTTGGCGAGATCGGAGGAGCGCGGTGGCACACCTTCGCGCCGCA
GCAAATCGGAGGGACCACCCGTTGTGCCCAATGGACGTGCGTATCCCATT
GCCACGGAGATCGACGGAACCACAAGAAAACAGGCGGGTGAGTCAAATGG
GCTATTGAAAAAGACCATCAATAAGTTGAGCACTGAGTACCGCCTGCAAT
TCGTTTGGCCCACCGTCCGACGCATAAAGGGCGGCGGCGAGGCGACGTCT
AGGGCCGCTGCCGGCGACTATCCGAGAAAGTCCATATCGCTGGGCGCCCT
TCGGTCCGGCGGCCAAGGTCACTGTCACAGTCACACCCAAAACCAGAATC
AGAGCCAGAGTCAGGGTCTGACCCAAGCCCAGAATGGTCACACACATCAC
ACGATGATGGGTGGCGGTGCGGGCTTGCCGACGGTGCATAAAAAACGAAC
AACAAATCAGAAAGAAGTGTTGCATGCTGCAGCCATCGAGAAGCACAGCA
GTTCCCACTTGAAGCTCAGAATCTCTCAGGAGCCAGCACTACTTCCCATT
GCTAATGACTCTCCCGATTCTTGCAGACAAGTGACCATTATGGAGCGCAA
GACCACCTCGCGTCCCTTCTCGCAGGCCATCGACCAGGAGCGCCTAAACC
ACTTCATCACGAAAAAGGAGAACTTTGGCTTCGCCGACGCCGCCGTGGCC
GCCGCGGCCCTCAAGGACGAGGTGGACAACCGGCAGGCCGGCGAATCCGG
CCAGGTGGTGGTCATGAACGGCTCTGCCCCGCCGCACTCGAAACCGAATT
TGGATTTGTGGTTCAAGGAGATGGTGGAGCTGCGCAAAAAAGCCGGCGAA
TACAAGTGTCGCGGTTGGGGCATAGAAATTGATCCGGAATTGTATAAGAA
ACAGAAGGATCTTTGGGATCAGGTTTCAAAGCGCAGCTCACTTTCGGCAC
TTTCCCTAGCCTCTTCAGTTCATAGACCTATTACAAAGGAGGAGAAGGAA
CAGGAGAACAATAAGAAGTCCACGCCATTGCAGAAGGCCCAGAAGCCGCG
TGTTCCTGGCCAAGCCTTTTTGATTGATAATAAGGATGAGATTTCAGCAC
TGCCAGCACGATTTAGCAATATACGCCATCACCTTGAACGCACCACAGGT
CCGGATGTGGAAGAGGGAGCTTTGTTGCCCTCGCCAACGCGCGAGAAGCT
GATGCCGGCTATTACCAAGCGGGAATCGGAATCTCAGCGAGGAAGTCCCA
AGAAGACCGCCTTGTCCAGGCACGGATCGCCTCAGAAGGGCAGTCCTCAA
AAGGGCAGCCCCAAGAAGGTCCTTAAAAGTGAGTAGTTCCCCGCTTTTTC
CCTCACCTTTGAGCAGAGGATACAAGGAAAGAATGCATACGCATATCCGA
TTTTAATTCCAAAGTTAACCATATCCGAATAGCAAATTTACTCTTTTGCA
ACAATGACACAAGTACACAAAATGCACTTACCAATAGAGTTACGAGTTTG
GGAACAGAACAAAACATTGTACACGCTCCAACAATAAGTATACGCCCCGT
TACCAATACCTTGATTTGGTTTCCTATGATTTTCGTTTTGCCATAGTTTG
CTCAACTGCTTCAACCGTTTGATTTGCATTTTCCCCGACAGTCGAAGGAG
TCGACTCGTTTTTCATCATTGTCAAGTGCACCGAAGACTTCTTGGGATAT
GAGATTTGTGCACAATCCTAATGTAGTTTCTATTTACTTACATTTGCCAG
TTTTTATCGAGGGTTTGTGTTCTGAATTCGGTTGAAAGTTGATTTTCATG
TTCTACGTTTAAGCTATGATTTGTAGAGAACCTTTTGAGAACATATGAGT
CAATCCCTTAAAACCACAACTACTTACATTTATATATTGAG
>CG17816|FBgn0037525
MIGSFWNLCRACPSMPVDKLHSEYRSTYRWHEFTGNSRPEVVRRAPAPNP
SQFVGATNEPPLPRRKKCPELAYKSHEFIIGSEYTDGRRDASAHRLARSE
ERGGTPSRRSKSEGPPVVPNGRAYPIATEIDGTTRKQAGESNGLLKKTIN
KLSTEYRLQFVWPTVRRIKGGGEATSRAAAGDYPRKSISLGALRSGGQGH
CHSHTQNQNQSQSQGLTQAQNGHTHHTMMGGGAGLPTVHKKRTTNQKEVL
HAAAIEKHSSSHLKLRISQEPALLPIANDSPDSCRQVTIMERKTTSRPFS
QAIDQERLNHFITKXENFGFADAAVAAAALRDEVDNRQAGESGQVVVMNG
SAPPHSKPNLDLWFKEMVELRKKAGEYKCRGWGIEIDPELYKKQKDLWDQ
VSKRSSLSALSLASSVHRPITKEEKEQENNKKSTPLQKAQRPRVPGQAFL
IDNKDEISALPARFSNIRHHLBRTTGPDVEEGALLPSPTREKIMPAITKR
ESESQRGSPKKTALSRHGSPQKGSPQKGSPKKVLKSE
>>CG10092|FBgn0037526|cDNA sequence
ATGATTCGCTTACGGCAAGCAATTTGTGAGCAGCTGCCGCATCTCAAGAA
TGCCTGCTATGCCCTGGAGGTGCCTGTCAAGAAACAACAGCTACAGAATA
GCCGACGTCCAACTGTGGAGTGGATTCTGCCCTCTGCGTTTGCGCAACAG
GAGGTGGAACTACTGGACTCATTGAAGAAGCGCAGATTCGAGGCCTATGT
GGAAAACGTTCGGATTGTACCTAGCGCTGGGCGCAGTGCAGCCAAAATCG
AGTTTCAGCTGCAGCCACAGGTCTTTGTAGAACAGCTCCTCCAAACTAAA
GAGATTGCTTTACATCCTTCGCCCTTTGCTGCGGAACACATAGTGGTTGA
GTACAGCTCGCCCAACATAGCCAAACCCTTCCACGTGGGCCACCTGCGCT
CCACAATCATCGGCAATGTTCTGGCCAACCTGCATGAGCATTTGGGCTAC
CGCACAACACGGTTGAACTATCTGGGGGATTGGGGCACGCAATTTGGACT
ACTGGTATTGGGAGTTCAACTGCTGAATGTAAGCGACAAAGAGATGCAAC
TATCCCCAATAGAAACGCTGTACAAATCCTACGTGGCCGCCAACAAGGCT
GCTGAACAAAGACCTGAAATCGCGCAACAGGCGAGGGACCTCTTCGCCGC
CTTGGAAGGAGGAACGGATAAATCAATGGCCAAGAAATGGCAGCAATACA
GAAACTACACTATAGAGGATCTATCCAAAGTCTATAACAGATTGGGCGTT
CACTTCGATAGCTACGAATGGGAATCCCAGTACTCCCAGCAGCAAATTCA
GGATGTTCTGGACAAACTGCGAAGCGCTGGACTCCTCCAGCCGGAGCACG
ATGGTCGTGAGATTGTCGTGGTGGACGGCCGACGCATTCCTGTGATCAAG
AGTAATGGATCCACTTTGTACCTGGCCAGGGACATAGCTGCCCTGCTGGA
GAGACTCTCCAGGTTCCAGTTCTCACGCTTGCTCTACGTCGTGGACAATG
GTCAAGCGGATCATTTTAATGCCCTTTTTAAAACAACGGCAGCCCTGGAT
GACCGCCTAAGTCTGGAACAGCTGCAACATGTGAAATTTGGACGCATTTA
TGGGATGAGCACTCGTCAGGGAAAGGCAATCTTTCTAAAAGATGTCCTAG
ATGAAGCACGAGACATAATGCGGGAAAAGCGAAACATAAGTGCCACTACC
AGAGAAAATTACAATCTGGATGATGAACATGTATGTGATATTTTGGGCGT
GTCAGCCGTCCTGGTCAATGTCCTTAAGCAGCGAAGGCAACGAGATCACG
AGTTCAGCTGGCAGCAGGCACTCCAAGTAAATGGTGACACAGGAATCAAG
CTTCAATACACACACTGCCGCCTGCACAGTTTGCTGGATAATTTCCGAGA
TGTAGATCTGGACGACATTAAGCCCGACTGGAAGCATTTCTCTACGGAGC
CTGCGGATGCTTTGGATCTGCTCTACGCACTGGCACGTTTCGATCAAAGC
GTTTGGCAATCGAAGGAACAACTGGAGGCTTGTGTCCTTGTCAACTATCT
CTTTGGATTGTGCAATGCCACCAGTCAAGCGCTGAAAAGATTGCCTGTGA
AACAAGAGTCCAGCCTAGAGAAGCAACTCCAACGCCTGCTTCTTTTTCAC
GCTGCCAAAAAAACACTGCGACACGGAATGGAGCTCCTTGGCCTGCGTCC
ACTGAACCAAATGTAG
>CG10092|FBgn0037526
MIRLRQAICEQLPHLKNACYALEVPVKKQQLQNSRRPTVEWILPSAFAQQ
EVELLDSLKKRRFEAYVENVRIVPSAGRSAAKIEFQLQPQVFVEQLLQTK
EIALHPSPFAAEHIVVEYSSPNIAKPFHVGHLRSTIIGNVLANLHEHLGY
RTTRLNYLGDWGTQFGLLVLGVQLLNVSDKEMQLSPIETLYKSYVAANKA
AEQRPEIAQQARDLFAALEGGTDKSMAKKWQQYRNYTIEDLSKVYNRLGV
HFDSYEWESQYSQQQIQDVLDKLRSAGLLQPEHDGREIVVVDGRRIPVIK
SNGSTLYLARDIAALLERLSRFQFSRLLYVVDNGQADHFNALFKTTAALD
DRLSLEQLQHVKFGRIYGMSTRQGKAIFLKDVLDEARDIMREKRNISATT
RENYNLDDEHVCDILGVSAVLVNVLKQRRQRDHEFSWQQALQVNGDTGIK
LQYTHCRLHSLLDNFRDVDLDDIKPDWKIIFSTEPADALDLLYALARFDQS
VWQSKEQLEACVLVNYLFGLCNATSQALKRLPVKQESSLEKQLQRLLLFH
AAKKTLRHGMELLGLRPLNQM
Scim31
AE003686 (insertion @193550), nearest ORF (CG4029: Dom) @187249 to 198668
>>Dom|FBgn0015660|cDNA sequence
ACCGGGCGGGTTTATTTTATCATTGCTCCGCGACTTCGAATACGAGACCG
GTGTTGTGCGCTCCTGATAACTGCGATATATTGAGCGCGAGCGCCATGTC
CTTTTGCTGGAAGTAGAATTTGAAAAGTGCAGAGATCACGGCTTGGATTG
CCAAGGAACAACGGTGTTGAGACTGAATATATTTTTTGTGCGCTGTTTCG
AAATAGAACCGTTAATTGGAATTGGCAGTAAGAAGCAGAGAGGCGGACGA
TATTCCGGTGAAATCTTCGCCAGGCGGAAACATCGATCAAAACAAAGTGC
ATGCTAAAAACATAAAAGATTCAACATGTTCGAACTAGAGGATTATTCGA
GCGGCATACATGAGGGATTCTTCAGCAAATATGCGGATGCGGCTGGACCC
TCGCTAGACTTTTATGTATCCGACTCGATGCAGGAGATGCTGAACGTGGA
CATCCGCGCAGAGATCGCCAATGTGGTGGGCAGTTCCAGCAGCGACTTGA
CCTCGTCCCTGGACCAAACACTGGAAGCTATATCCGCGATAAACAACAAC
CAGAGCAATGGAAACAGCAGCCAGTCAGCTTCTTACAATGCGAATGCGAA
TTTTCTGACCAGCAGCGGACTCCACGCCTCACCCACAGCGAAATGGATGG
GCTCGTCGGCCAATTTTTGGTCCAACAGCGATTACTATGCGGATCTGGGG
GCATGTGTGAACCCCATTTCCGTAATGCCACTGATAAATTCGACTTCTGC
AGGAATGTTCTCGCCAAAAAAAAACAAGACAGCCTCAAGTACGCAGGGAA
GATCGGGAGCGGTGCCCTCGTCGCCCAGCGCCGAAAGGGATCAGCACAAA
TCGCACCTGACATTTTCGCCGGCTCAGATGAAGGTCAGTGCAGGATCCAT
GCGGCGGGACCAGGTGATGGCACACATTCCCAAGCAAATATCCGTGGTCA
CGGGCACCGGAACCACAGCGCCCGCCACAATGGCCACCAATTCGGTGCTT
CAACGGCGTAATTCCTCGGCCGTGGATGCTGTACGTAAGGATTTGGTCAC
AGAGCTGCGTAAAGCACAATCCAGTCCAGTGCCCAATTCCTTGGAGGAGC
TGGGCAAGGGAAAAGGATCAACACTGCTAAATGCCAGTGTTGGGGCGACC
AACACCATTAAACTGGCGCCCGGTATCGGTGGGTTAACCTTTGCCAACAG
TGCAGCCTACCAGAAGCTGAAGCAAACATCCTTGGTTAAGTCACCAGGCG
GTATTTCGCCAGGAGCAGGATCCAATATGGGTCTCAAGCGGGAGGACTCA
AACAAGCGAGGACTGCAGGCCAGCACCACGCCAAAGAGCATTGCTTCGGC
GGCAAACTCGCCGCATCATCAAATGCAGAGCAACTACAGCCTGGGATCAC
CTTCATCACTGTCCTCCTCATCTGCATCCTCTCCCCTAGGGAATGTGAGC
AACCTGGTCAACATAGCGAATAACAATACAAGCGGAGCTGGATCCGGCTT
GGTGAAGCCTCTGCAGCAAAAGGTTAAACTGCCACCCGTGGGCAGTCCAT
TTCCCAAACCAGCATACTCGTACTCCTGCCTCATCGCTTTGGCCCTCAAG
AATTCGCGAGCAGGATCCCTTCCGGTCTCGGAAATATATAGTTTCCTATG
CCAGCATTTCCCTTACTTCGAGAATGCCCCCAGCGGCTGGAAGAACAGTG
TGCGTCACAACCTGTCTTTAAACAAATGCTTTGAGAAGATCGAAAGACCA
GCGACGAATGGCAACCAGAGAAAGGGCTGCCGTTGGGCCATGAATCCCGA
TCGTATCAACAAGATGGACGAGGAGGTGCAAAAGTGGTCGCGCAAGGATC
CGGCTGCCATACGTGGAGCCATGGTATATCCTCAGCATCTGGAGTCCCTG
GAAAGGGGAGAGATGAAGCACGGATCGGCAGACTCGGATGTAGAGCTGGA
CTCGCAATCGGAAATTGAGGAGTCTTCGGATCTGGAGGAACACGAATTCG
AGGACACTATGGTGGATGCAATGCTGGTAGAAGAGGAAGACGAGGAGGAG
GACGGGGATGATGATGAGCAAATAATCAACGATTTTGATGCGGAAGATGA
GCGTCATGCCAACGGAAACCAGGCAAACAACCTACCCATCAACCATCCAC
TACTTGGTCAGAAAAGTAACGACTTCGATATAGAGGTCGGGGATCTATAC
GACGCAATCGACATAGAGGATGATAAGGAGTCAGTGCGTCGAATTATCTC
GAATGACCAGCACATCATTGAGTTGAACCCTGCCGATCTGAATGCCACCG
ATGGCTACAACCAGCAGCCGGCATTGAAACGGGCTCGCGTCGACATTAAC
TATGCAATTGGTCCTGCTGGCGAGTTGGAACAGCAATACGGCCAGAAAGT
GAAGGTGCAGCAAGTCATACAGCCGCAGCAGCATCCGCCCACCTACAACA
GGCGCAAGATGCCGCTGGTCAACCGCGTCATCTAGAGCGGGGCACAGCCC
AAAAACCCATTACATTAATCAATTAGTTTTAGACCTTTGGCATTTAAGAA
ACCCATGCTACGCTTAAACGTAATCCTAGAAGCCCCATCATTCAATATCG
AATATCAGTTTTCAGTTTCGTGTGCAAAACCCAAATTGTTATTAAATCTC
CCTTCCTATTTGTAGTTCAGTTTGGCTGCTGTTTGATTTTAAATCTCGAT
TAGAGCCTGTGCCAACTGAAAAAGAGAGATAACTTGTGCCCTTTTGTTTT
TGCTTAATTTAAATCTTTCTATAGTCGCTTCTCGAATAAATCTGTATTAT
ATTGTTCGAAAAGAACTGAGATATTGCTCCACTTGACGATATTTCCGTTT
TAATTCGCCTGACGCTTGAGGAGAAAAACTCAATAGGTTCCACTGACGAC
GCATGAAGCATGTTAATACTTTTTACCAGACTCGAGCTGGTTTGAGTTGC
AACTTTTGATTTGATCTCCCTACTGACAAATAAATTTTCATCCTTCAATC
GATAAGAAACTTGACAATGCATTTATGACAAACGATTCCACGCTTAGTCG
TAGAATAATATTAATGTGCAACACAACGATTACTTTGACAACGAAATGTG
AACAGTAGGTTTATATTTCGAACTTTTGTTGATTATTTCACCACATGGTG
ACAATTTGCATTTGTTTCGAACATTTTCAGCTAACATTTAAGAAAATTGA
AAGAGAATTGATCACACATACTTGCCGGTCCAGTATTCGTAAGCGAGGTA
TATTGAGGATTTTTACAGAACTTTTATACGAATTGTACTATATATACATG
GAAAACCAACAATTAATGTCGGAAAGTTCAGTCAATTAATAATATGGATA
TTTTATAAGGCGGTTCCGTATGTAAATAGTTTACACGCAGAGAATAAATTT
GTATACTATGGCATAGATGTAAGTAATATGTATGTAAAATAATTTGTAAA
CGAAATCCGAATTCCAAATAATACAAGATACGAAAACCAATAAGACTTAA
AAGAAGCGTACCAGACTAATGAACATGATCAGGCCTCAGAAGTAAATAGT
ACAAAGAGCTAGACTTTTGGGTCCAAGCAGTTACAAAGCCAACTCAAGGA
TGGCTGATGGAATTAAACCGTTTTTGTTATTACCCTTTTCTTTTGTGATG
CTTCGACTTAGCTTGCGCATTTAACAATTCCATTTACGAACCAGGAACAT
TTATGCATTTTTTGTTGTAATATTAGCACCTAAATATTGTATTTAATCAT
TAAGTGAAGCTCTGTAAATCTTTAAGCTAAGAAAAACAATTTTTGTATAG
AGTTGTTAGAAAATCAATTGACAAAAACAAATTGAAACCAAAAAAAAAA
>Dom|FBgn0015660
MFELEDYSSGIHEGFFSKYADAAGPSLDFYVSDSMQEMLNVDIRAEIANV
VGSSSSDLTSSLDQTLEAISAINNNQSNGNSSQSASYNANANFLTSSGLH
ASPTAKWMGSSANFWSNSDYYADLGACVNPISVMPLINSTSAGMFSPKKN
KTASSTQGRSGAVPSSPSAERDQHKSHLTFSPAQMKVSAGSMRRDQVMAH
IPKQISVVTGTGTTAPATMATNSVLQRRNSSAVDAVRKDLVTELRKAQSS
PVPNSLEELGKGKGSTLLNASVGATNTIKLAPGIGGLTFANSAAYQKLKQ
TSLVKSPGGISPGAGSNMGLKREDSNRRGLQASTTPKSIASAANSPHHQM
QSNYSLGSPSSLSSSSASSPLGNVSNLVNIANNNTSGAGSGLVKPLQQKV
KLPPVGSPFPKPAYSYSCLIALALKNSRAGSLPVSEIYSFLCQHFPYFEN
APSGWKNSVRHNLSLNKCFEKIERPATNGNQRKGCRWAMNPDRINKMDEE
VQKWSRKDPAAIRGAMVYPQHLESLERGEMKHGSADSDVELDSQSEIEES
SDLEEHEFEDTMVDAMLVEEEDEEEDGDDDEQIINDFDAEDERHANGNQA
NNLPINHPLLGQKSNDFDIEVGDLYDAIDIEDDKESVRRIISNDQHIIEL
NPADLNATDGYNQQPALKRARVDINYAIGPAGELEQQYGQKVKVQQVIQP
QQHPPTYNRRKMPLVNRVI
Scim32¹
Scim32²
AE003697 (B198 insertion @25820), CG10120 19300 to 28025, (E587 insertion
somewhere between 29264 and 29813—CG10120 is still the nearest locus)
22 >CG10120|FBgn0038081|cDNA sequence
AGCCGCGATTTCAGCGCGAGTTCAGTTTTTGATTCAGTTTCAGGCGGTTC
GGAGTTGCTAAGTCAAGCGCAATAGCTCAAAATACACTTTTTTTAATTTT
TGTTAATAACTGTTTTTAATAATTCCGGTGAAACATCGCGTGGTCAAGCG
AACTGAGTTAATTTTCGCGTTAGAAAAGTTCACAAGTTTTGCGTTTACCA
AATAATTAACTATAACTATTTAACTGGAGCTAATTTAACTGAAATTTAGA
ACCCAAAATGGGTAATTCCAGTTCCATTTGCGCCGATCGCAATGTCATAA
CAAATTTCGATGAAAATGGCACGCCGGTTTATCCCACCGCCAACAATTCG
CAGAGTCCTTCCTCATATAGTCGCGGCAAAGAGCGCGAGCTCGGCTGTTA
CACGAAGAGAAACAGCAACAGCAACAACAACAATAGCCATGAGAGAGAGA
GTCAGAGCTGTTGTAGTAGTCGTGTGTGTAAAAATCATACGACCACAACG
ACAACCACACTCGAATACGAACTTTCCAATTTCGCAAAACTAACGACACG
AATCACAACGCAAAGTGCCGCCGAAGTGGACACATCGCCGCATACGGATA
CGGAAACGCATAGGGACAGAGATTCGAATCCGGGTAATATAGCCTTAGCC
ACCGATTTGGAACTGCCCAAGGGTCTGCCGTTATCGTTATCCTCGCGACA
CCACTGGAATCAGCTGCAGAGCAGTTTGCACGCCCTTCACCACCAGCAAC
AGCAACAACAACAGCAACTACGTTCATACAGCTCCACTAGCGAAACAAAT
TTGGAAGACAAGATGAGCAAACCCGATTCGAAACTAGATAAATACGCGCA
GCGCGATCGCCTGGGCCTTTGGGGCACTGGTGACAATGAGGTGGTCGGCA
GCCTCTCCGGATTCACCCGACTCTTGGACAAGCGCTACTCAAAGGGCCTG
GCCTTCACACACGAGGAGCGCCAGCAGTTGGGCATCCATGGCATGCTGCC
CTATGTGGTCCGTGAGCCCAGTGAGCAGGTGGAGCACTGCCGCGCTCTGC
TGGCGCGACTGGATCAGGATCTGGACAAGTACATGTACCTGATCAGCCTA
TCGGAGCGGAACGAGCGTCTGTTCTACAACGTGCTCAGCTCAGACATCGC
CTACATGATGCCACTGGTGTACACGCCCACCGTGGGATTGGCCTGCCAGC
GCTACAGTTTGATCCACCAGAACGCCAAGGGCATGTTCATATCCATCAAG
GACAAGGGACACATCTACGACGTGCTAAAGAACTGGCCGGAAACGGATGT
GCGTGCCATCGTTGTCACGGACGGCGAGCGCATCCTGGGACTGGGAGATC
TGGGCGCCAACGGAATGGGTATACCCGTGGGCAAACTGTCCCTGTATACG
GCCTTGGCGGGCATTAAGCCATCGCAGTGCCTGCCCATCACCTTGGATGT
GGGCACCAATACCGAATCCATCCTGGAGGATCCCCTGTACATCGGTCTGC
GCGAACGCAGGGCCACTGGAGATCTGTACGATGAGTTCATCGATGAGTTC
ATGCATGCCTGCGTTCGTCGCTTTGGTCAAAACTGCCTAATCCAGTTCGA
GGACTTTGCCAACGCCAATGCCTTCAGGCTGTTGTCCAAATACCGCGACT
CCTTCTGCACCTTCAACGACGATATTCAAGGAACCGCGTCGGTGGCCGTG
GCTGGTCTGCTGGCCTCGCTAAAGATCAAGAAGACCCAGCTGAAGGATAA
CACGCTGTTGTTCCTGGGCGCCGGAGAAGCGGCTCTTGGTATTGCCAACC
TGTGCCTGATGGCCATGAAGGTGGAGGGTCTCACCGAGGAGGAGGCCAAG
GCCCGCATCTGGATGGTGGATAGCCGTGGTGTCATCACCCGCGATCGTCC
AAAGGGCGGACTCACCGAACACAAGCTGCACTTTGCCCAGCTGCACGAAC
CCATCGATACTTTGGCAGAGGCGGTGCGAAAGGTGCGTCCCAATGTCCTG
ATTGGAGCGGCTGCGCAGGGCGGCGCCTTCAACCAGGAGATCCTTGAGCT
GATGGCCGATATTAATGAGACGCCGATCATCTTTGCACTGTCCAATCCGA
CCAGCAAGGCGGAGTGCACCGCCGAGGAGGCGTATACGTACACCAAGGGG
CGCTGCATCTTCGCCAGCGGTTCGCCTTTTGCTCCTGTGACGTACAACAA
CAAGAAGTTCTATCCGGGTCAGGGCAACAACTCGTACATTTTCCCTGGCG
TGGCACTGGGTGTTCTGTGTGCCGGCATGCTGAACATTCCCGAGCAGGTA
TTCTTGGTCGCCGCCGAGCGCTTGGCGGAGCTGGTCTCCAAGGACGACCT
GGCCAAGGGCAGCTTGTATCCACCACTCAGCTCCATTGTCAGCTGTTCGA
TGGCCATTGCCGAAAGGATTGTGGAGTACGCCTACAAAAACGGATTGGCC
ACTGTTCGTCCAGAGCCGGTCAATAAGCTGGCGTTCATCAAGGCCCAGAT
GTACGATCTGGACTATCCCCGATCCGTGCCCGCCACCTATAAGATGTAGA
TGATGGCCAGATGATGAGGATCCATTCCGCCTAACCCCAGAAACCAAAAG
GAGTGGCCATCAAAAGATATCCGGCAAGGGCGGCGAGCAGTAACCATGTT
ATTTATTTTATAATGTCGCACATTTGTCGTCTAGCATAATATCCAAATTT
GTATCGCGGCTAATTAACCACAACCACACACTATCCACCAACAACCATAT
TATAAAAAAAAACCAACTAAAATGGAATGTCATCAGCTTGCGGCGCGCGA
TTTTGTATAATGCTAACTATGTAAATGGGATATTGATCTAATAGATATGT
AAACAAATTTTATGTAATCTTGAACAACACAAACTATTCTAAGGATATAT
ACAAATAAAGAAATAAACAAAAAT
>>CG10120|FBgn0038081|cDNA sequence
AAAGCTGCAGCAACGCAGACAAAAGTCAAATACTCAGTGAGATAATTGTC
GGCAAATCAATATACTAATAAGTATATAATATAGAAGACTTTTAAGAGCA
CCGCCATGTACTCGATCCTACGACGCTGTTCTGGTATCAGAAAAACTTTT
GGACCCACGCCGGTTTATCCCACCGCCAACAATTCGCAGAGTCCTTCCTC
ATATAGTCGCGGCAAAGAGCGCGAGCTCGGCTGTTACACGAAGAGAAACA
GCAACAGCAACAACAACAATAGCCATGAGAGAGAGAGTCAGAGCTGTTGT
AGTAGTCGTGTGTGTAAAAATCATACGACCACAACGACAACCACACTCGA
ATACGAACTTTCCAATTTCGCAAAACTAACGACACGAATCACAACGCAAA
GTGCCGCCGAAGTGGACACATCGCCGCATACGGATACGGAAACGCATAGG
GACAGAGATTCGAATCCGGGTAATATAGCCTTAGCCACCGATTTGGAACT
GCCCAAGGGTCTGCCGTTATCGTTATCCTCGCGACACCACTGGAATCAGC
TGCAGAGCAGTTTGCACGCCCTTCACCACCAGCAACAGCAACAACAACAG
CAACTACGTTCATACAGCTCCACTAGCGAAACAAATTTGGAAGACAAGAT
GAGCAAACCCGATTCGAAACTAGATAAATACGCGCAGCGCGATCGCCTGG
GCCTTTGGGGCACTGGTGACAATGAGGTGGTCGGCAGCCTCTCCGGATTC
ACCCGACTCTTGGACAAGCGCTACTCAAAGGGCCTGGCCTTCACACACGA
GGAGCGCCAGCAGTTGGGCATCCATGGCATGCTGCCCTATGTGGTCCGTG
AGCCCAGTGAGCAGGTGGAGCACTGCCGCGCTCTGCTGGCGCGACTGGAT
CAGGATCTGGACAAGTACATGTACCTGATCAGCCTATCGGAGCGGAACGA
GCGTCTGTTCTACAACGTGCTCAGCTCAGACATCGCCTACATGATGCCAC
TGGTGTACACGCCCACCGTGGGATTGGCCTGCCAGCGCTACAGTTTGATC
CACCAGAACGCCAAGGGCATGTTCATATCCATCAAGGACAAGGGACACAT
CTACGACGTGCTAAAGAACTGGCCGGAAACGGATGTGCGTGCCATCGTTG
TCACGGACGGCGAGCGCATCCTGGGACTGGGAGATCTGGGCGCCAACGGA
ATGGGTATACCCGTGGGCAAACTGTCCCTGTATACGGCCTTGGCGGGCAT
TAAGCCATCGCAGTGCCTGCCCATCACCTTGGATGTGGGCACCAATACCG
AATCCATCCTGGAGGATCCCCTGTACATCGGTCTGCGCGAACGCAGGGCC
ACTGGAGATCTGTACGATGAGTTCATCGATGAGTTCATGCATGCCTGCGT
TCGTCGCTTTGGTCAAAACTGCCTAATCCAGTTCGAGGACTTTGCCAACG
CCAATGCCTTCAGGCTGTTGTCCAAATACCGCGACTCCTTCTGCACCTTC
AACGACGATATTCAAGGAACCGCGTCGGTGGCCGTGGCTGGTCTGCTGGC
CTCGCTAAAGATCAAGAAGACCCAGCTGAAGGATAACACGCTGTTGTTCC
TGGGCGCCGGAGAAGCGGCTCTTGGTATTGCCAACCTGTGCCTGATGGCC
ATGAAGGTGGAGGGTCTCACCGAGGAGGAGGCCAAGGCCCGCATCTGGAT
GGTGGATAGCCGTGGTGTCATCACCCGCGATCGTCCAAAGGGCGGACTCA
CCGAACACAAGCTGCACTTTGCCCAGCTGCACGAACCCATCGATACTTTG
GCAGAGGCGGTGCGAAAGGTGCGTCCCAATGTCCTGATTGGAGCGGCTGC
GCAGGGCGGCGCCTTCAACCAGGAGATCCTTGAGCTGATGGCCGATATTA
ATGAGACGCCGATCATCTTTGCACTGTCCAATCCGACCAGCAAGGCGGAG
TGCACCGCCGAGGAGGCGTATACGTACACCAAGGGGCGCTGCATCTTCGC
CAGCGGTTCGCCTTTTGCTCCTGTGACGTACAACAACAAGAAGTTCTATC
CGGGTCAGGGCAACAACTCGTACATTTTCCCTGGCGTGGCACTGGGTGTT
CTGTGTGCCGGCATGCTGAACATTCCCGAGCAGGTATTCTTGGTCGCCGC
CGAGCGCTTGGCGGAGCTGGTCTCCAAGGACGACCTGGCCAAGGGCAGCT
TGTATCCACCACTCAGCTCCATTGTCAGCTGTTCGATGGCCATTGCCGAA
AGGATTGTGGAGTACGCCTACAAAAACGGATTGGCCACTGTTCGTCCAGA
GCCGGTCAATAAGCTGGCGTTCATCAAGGCCCAGATGTACGATCTGGACT
ATCCCCGATCCGTGCCCGCCACCTATAAGATGTAGATGATGGCCAGATGA
TGAGGATCCATTCCGCCTAACCCCAGAAACCAAAAGGAGTGGCCATCAAA
AGATATCCGGCAAGGGCGGCGAGCAGTAACCATGTTATTTATTTTATAAT
GTCGCACATTTGTCGTCTAGCATAATATCCAAATTTGTATCGCGGCTAAT
TAACCACAACCACACACTATCCACCAACAACCATATTATAAAAAAAAACC
AACTAAAATGGAATGTCATCAGCTTGCGGCGCGCGATTTTGTATAATGCT
AACTATGTAAATGGGATATTGATCTAATAGATATGTAAACAAATTTTATG
TAATCTTGAACAACACAAACTATTCTAAGGATATATACAAATAAAGAAAT
AAACAAAAAT
>CG10120|FBgn0038081
MGNSSSICADRNVITNFDENGTPVYPTANNSQSPSSYSRGKERELGCYTK
RNSNSNNNNSHERESQSCCSSRVCKNHTTTTTTTLEYELSNFAKLTTRIT
TQSAAEVDTSPHTDTETHRDRDSNPGNIALATDLELPKGLPLSLSSRHHW
NQLQSSLHALHHQQQQQQQQLRSYSSTSETNLEDKMSKPDSKLDKYAQRD
RLGLWGTGDNEVVGSLSGFTRLLDKRYSKGLAFTHEERQQLGIHGMLPYV
VREPSEQVEHCRALLARLDQDLDKYMYLISLSERNERLFYNVLSSDIAYM
MPLVYTPTVGLACQRYSLIHQNAKGMFISIKDKGHIYDVLKNWPETDVRA
IVVTDGERILGLGDLGANGMGIPVGKLSLYTALAGIKPSQCLPITLDVGT
NTESILEDPLYIGLRERRATGDLYDEFIDEFMHACVRRFGQNCLIQFEDF
ANANAFRLLSKYRDSFCTFNDDIQGTASVAVAGLLASLKIKKTQLKDNTL
LFLGAGEAALGIANLCLMAMKVEGLTEEEAKARIWMVDSRGVITRDRPKG
GLTEHKLHFAQLHEPIDTLAEAVRKVRPNVLIGAAAQGGAFNQEILELMA
DINETPIIFALSNPTSKAECTAEEAYTYTKGRCIFASGSPFAPVTYNNKK
FYPGQGNNSYIFPGVALGVLCAGMLNIPEQVFLVAAERLAELVSKDDLAK
GSLYPPLSSIVSCSMAIAERIVEYAYKNGLATVRPEPVNKLAFIKAQMYD
LDYPRSVPATYKM
>CG10120|FBgn0038081
MYSILRRCSGIRKTFGPTPVYPTANNSQSPSSYSRGKERELGCYTKRNSN
SNNNNSHERESQSCCSSRVCKNHTTTTTTTLEYELSNFAKLTTRITTQSA
AEVDTSPHTDTETHRDRDSNPGNIALATDLELPKGLPLSLSSRHHWNQLQ
SSLHALHHQQQQQQQQLRSYSSTSETNLEDKMSKPDSKLDKYAQRDRLGL
WGTGDNEVVGSLSGFTRLLDKRYSKGLAFTHEERQQLGIHGMLPYVVREP
SEQVEHCRALLARLDQDLDKYMYLISLSERNERLFYNVLSSDIAYMMPLV
YTPTVGLACQRYSLIHQNAKGMFISIKDKGHIYDVLKNWPETDVRAIVVT
DGERILGLGDLGANGMGIPVGKLSLYTALAGIKPSQCLPITLDVGTNTES
ILEDPLYIGLRERRATGDLYDEFIDEFMHACVRRFGQNCLIQFEDFANAN
AFRLLSKYRDSFCTFNDDIQGTASVAVAGLLASLKIKKTQLKDNTLLFLG
AGEAALGIANLCLMAMKVEGLTEEEAKARIWMVDSRGVITRDRPKGGLTE
HKLHFAQLHEPIDTLAEAVRKVRPNVLIGAAAQGGAFNQEILELMADINE
TPIIFALSNPTSKAECTAEEAYTYTKGRCIFASGSPFAPVTYNNKKFYPG
QGNNSYIFPGVALGVLCAGMLNIPEQVFLVAAERLAELVSKDDLAKGSLY
PPLSSIVSCSMAIAERIVEYAYKNGLATVRPEPVNKLAFIKAQMYDLDYP
RSVPATYKM
Scim33
AE003722 (insertion @11670), nearest ORF (CG7682) @11602
CG18617 gene product
>>CG7682|FBgn0038614|cDNA sequence
CCGTTCGCTCTCTTCGCCTTCTCTTTTCTCTCCCGCTTTCTTCTCTCCAC
CTCTTCACTGCTTTGCTGGTCAATCTAGCCTTGTGTGCGTGAGTGTGGGT
GCGCCTATCACGATGTACAGGTAAACTTTTATTATTACTAAATGTCCAGA
AGTCTTTAATTAAAATAATTACTTATTGCGACAATAAGTAAGAAGGTGAA
ATGTAAGACTTCCCAAATTGCAATAAGAACAATAGCTGTGAGAGCAATAA
TAATCTTCAGCTTTTATCACTGAGCGGAGCGACATAAGCAAGCTGCACTG
TACTTCAGATGCAATGTTGTTGTTTCAGTTGTTGTAGCTGCTCCTTGGCT
TTCACACGCGAGTTGTGGGTGAGCCTTAATCACATTTATTCGATGGTGAG
TGGAGAAGGAGGTGCTGAGTGGGCGAGGGAGCGGCGCCGAGAGAGCGAAC
GAGCGGTTGACATTGACAACCCCCCTTTTTTGCTGTTGGGAGCGGGCGCA
CGCCCATGTCCAGCTGCCCAGCGGCAGCGACCAGGAGCGCAGGCAGGCGC
AGCTCGCGGCCAGCACCTACGACGTGCTACAGCGGACGACGGACAGTATC
CAGCGATCCAACCAGATTGCCATCGAAACGGAGAACATGGGGGCGGAGGT
ACTCGGCGAACTGGGCGAGCAGAGGGAGTCGCTGCTACGCACCACGCGCC
GCCTGGAGGACGCCGATCAGGATCTGTCCAAATCGAGGGTCATCATTCGG
AAGTTGAGCAGGGAGGTGCTCTACAACAAGATCATCCTAA
>CG7682|FBgn0038614
MSSCPAAATRSAGRRSSRPAPTTCYSGRRTVSSDPTRLPSRRRTWGRRYS
ANWASRGSRCYAPRAAWRTPIRICPNRGSSFGS
>>BcDNA:LD21735|FBgn0027516|cDNA sequence
CCTCTCAGCTGGCTCAGTGTTTTTTTAGTGTTCGAGCTGTGCGTGTGAAC
TGTGATATTGCGATATTGGGCTATCGCAATTGGAAACTGGACTTTTGGTT
GAATTCATTATAAACGAAAGTGCGCTCGTTGAATCATTAAACAACATTTG
AGCAGGCGAGTTACAATTCTATTACCGGTTTTTTTTTTAAAGCCAATCGA
GTTTTGGAGGTAATTCTCGTCGGCGGAGGGAACGTAAGCAGTCGCCAAGA
TGGGGGACATGTTCCGTAGTGAGGAGATGGCACTCTGCCAGATGTTCATT
CAGCCGGAGGCCGCGTATACCTCCGTATCTGAGCTGGGCGAAACCGGCTG
CGTGCAGTTCCGCGACTTGAATGTGAACGTGAACGCCTTCCAGCGCAAGT
TCGTCACCGAGGTGCGTCGCTGCGATGAGCTGGAGCGCAAGATCCGCTAC
ATCGAGACGGAGATCAAGAAGGACGGCATCGTCCTGCCCGACATCCAGGA
TGACATTCCGCGTGCGCCCAATCCACGCGAGATCATCGATCTGGAGGCGC
ATCTGGAGAAGACCGAGTCGGAGATGATCGAGCTGGCCCAGAACGAGGTG
AACATGAAGTCCAACTATCTGGAGCTGACCGAGCTGCGCAAGGTGCTGGA
GAACACGCAGGGCTTCTTCTCCGACCAGGAGGTTCTCAATCTGGACTCCT
CCAACCGAGCTGGAGGAGACAACGATGCTGCTGCTCAACACCGTGGCCGG
CTTGGATTCGTTGCCGGTGTAATTAACCGGGAGCGAGTGTTTGCCTTTGA
GCGTATGCTGTGGCGCATCTCCAGGGGCAATGTCTTCCTCAAGCGCTCCG
ATCTGGACGAGCCGCTGAACGATCCGGCCACCGGACATCCCATCTACAAG
ACCGTCTTCGTGGCCTTCTTCCAGGGCGAGCAACTGAAGAACCGTATCAA
GAAGGTGTGCACTGGCTTCCACGCCTCGCTGTATCCCTGTCCCAGCTCGC
ACAACGAGCGCGAGGAAATGGTTCGCAATGTGCGCACCCGCCTGGAGGAT
CTGAAGCTGGTCCTTAGCCAGACGGAGGATCATCGTAGCCGCGTCCTGGC
CACCGTGTCCAAGAATCTGCCCTCGTGGTCGATCATGGTCAAGAAGATGA
AGGCCATTTACCACACGCTGAATCTGTTCAACATGGACGTGACCAAGAAG
TGCCTGATTGGCGAGTGTTGGGTGCCCACCAATGATTTGCCCGTTGTCCA
AAAGGCTCTGTCCGATGGATCTGCTGCAGTGGGCAGCACCATACCCTCGT
TCCTGAACGTGATCGACACCAACGAGCAGCCGCCGACCTTTAACAGGACT
AACAAGTTTACCCGTGGCTTCCAGAATCTGATTGATGCCTACGGAGTGGC
CTCGTACAGAGAGTGCAATCCCGCCCTGTACACCTGCATCACCTTCCCCT
TCCTTTTCGCTGTGATGTTCGGCGATTTGGGTCACGGCCTTATTCTGGTT
TTGTTTGGAGCTTGGATGGTTTTGTGCGAGCGCAAGCTGGCTCGCATCCG
CAACGGTGGTGAGATCTGGAACATCTTCTTCGGCGGTCGCTATATCATTC
TGCTGATGGGTCTGTTTGCCATGTACACTGGTTTGGTTTACAACGATGTC
TTCTCCAAGTCGATGAACCTGTTTGGATCACGTTGGTTCAACAACTACAA
CACAACGACTGTCCTGACCAACCCGAATCTGCAGTTGCCGCCCAACAGCT
CCGCCGTGGGTGTCTATCCCTTCGGAATGGATCCCTTTCAAGATGAAGCT
CTCGATCATCTTCGGAGTGCTGCACATGGTCTTCGGCGTGTGCATGTCGG
TCGTTAACTTCACCCACTTCAAGCGTTATGCCTCCATTTTCCTGGAGTTC
GTGCCCCAAATTCTGTTCCTGCTACTGCTCTTCGGCTACATGGTGTTCAT
GATGTTCTTCAAGTGGTTCAGCTATAACGCTAGGACTAGCTTCCAGCCAG
AAACTCCTGGATGCGCTCCCTCCGTGTTGATCATGTTCATCAACATGATG
CTGTTCAAGAACACTGAGCCACCAAAGGGTTGCAACGAGTTCATGTTCGA
GTCACAGCCCCAGTTGCAGAAGGCCTTTGTGCTCATCGCCCTGTGCTGCA
TTCCTTGGATGCTTCTGGGCAAGCCCCTGTACATCAAGTTCACTCGCAAA
AACAAGGCTCATGCCAATCACAATGGTCAGTTGACCGGCAACATTGAACT
GGCCGAAGGCGAGACTCCTCTGCCCACAGGATTCTCTGGAAACGAGGAGA
ATGCCGGGGGTGCCCATGGCCATGACGATGAGCCCATGAGCGAAATCTAC
ATCCATCAAGCCATCCACACCATCGAATATGTGCTCAGTACCATCTCGCA
CACGGCGTCCTATCTGCGTCTCTGGGCTCTGTCCCTGGCTCACGCCCAGC
TCTCCGAGGTGCTGTGGCAAATGGTGTTGTCCCTGGGCCTTAAGATGTCC
GGCGTGGGCGGTGCCATTGGTCTGTTCATCATCTTCGGCGCCTGGTGCTT
GTTCACCCTGGCTATCCTGGTCCTCATGGAGGGTCTGTCCGCCTTCCTGC
ACACTCTGCGTCTGCACTGGGTGGAGTTCATGAGCAAGTTCTACGAGGGA
ATGGGCTACGCCTTCCAGCCGTTCAGCTTCAAGGCCATTCTCGATGGCGA
AGAGGAGGAGTAA
>>BcDNA:LD21735|FBgn0027516|cDNA sequence
ATCGCTGGCGGTGAGCAGACGTGTGCTGCGCTCCATTCAGATTCAGATTC
GAATAAAGATACTCTCGCTCGGCAACAAACAAGTTCTAAATTTATCGCTC
GCACTCGCGGGGAATCGAATCTGGTGTGTCTTTGACATAAAAAGCGTTTT
CGGAGCTGTGAAGGGAACGTAAGCAGTCGCCAAGATGGGGGACATGTTCC
GTAGTGAGGAGATGGCACTCTGCCAGATGTTCATTCAGCCGGAGGCCGCG
TATACCTCCGTATCTGAGCTGGGCGAAACCGGCTGCGTGCAGTTCCGCGA
CTTGAATGTGAACGTGAACGCCTTCCAGCGCAAGTTCGTCACCGAGGTGC
GTCGCTGCGATGAGCTGGAGCGCAAGATCCGCTACATCGAGACGGAGATC
AAGAAGGACGGCATCGTCCTGCCCGACATCCAGGATGACATTCCGCGTGC
GCCCAATCCACGCGAGATCATCGATCTGGAGGCGCATCTGGAGAAGACCG
AGTCGGAGATGATCGAGCTGGCCCAGAACGAGGTGAACATGAAGTCCAAC
TATCTGGAGCTGACCGAGCTGCGCAAGGTGCTGGAGAACACGCAGGGCTT
CTTCTCCGACCAGGAGGTTCTCAATCTGGACTCCTCCAACCGAGCTGGAG
GAGACAACGATGCTGCTGCTCAACACCGTGGCCGGCTTGGATTCGTTGCC
GGTGTAATTAACCGGGAGCGAGTGTTTGCCTTTGAGCGTATGCTGTGGCG
CATCTCCAGGGGCAATGTCTTCCTCAAGCGCTCCGATCTGGACGAGCCGC
TGAACGATCCGGCCACCGGACATCCCATCTACAAGACCGTCTTCGTGGCC
TTCTTCCAGGGCGAGCAACTGAAGAACCGTATCAAGAAGGTGTGCACTGG
CTTCCACGCCTCGCTGTATCCCTGTCCCAGCTCGCACAACGAGCGCGAGG
AAATGGTTCGCAATGTGCGCACCCGCCTGGAGGATCTGAAGCTGGTCCTT
AGCCAGACGGAGGATCATCGTAGCCGCGTCCTGGCCACCGTGTCCAAGAA
TCTGCCCTCGTGGTCGATCATGGTCAAGAAGATGAAGGCCATTTACCACA
CGCTGAATCTGTTCAACATGGACGTGACCAAGAAGTGCCTGATTGGCGAC
TGTTGGGTGCCCACCAATGATTTGCCCGTTGTCCAAAAGGCTCTGTCCGA
TGGATCTGCTGCAGTGGGCAGCACCATACCCTCGTTCCTGAACGTGATCG
ACACCAACGAGCAGCCGCCGACCTTTAACAGGACTAACAAGTTTACCCGT
GGCTTCCAGAATCTGATTGATGCCTACGGAGTGGCCTCGTACAGAGAGTG
CAATCCCGCCCTGTACACCTGCATCACCTTCCCCTTCCTTTTCGCTGTGA
TGTTCGGCGATTTGGGTCACGGCCTTATTCTGGTTTTGTTTGGAGCTTGG
ATGGTTTTGTGCGAGCGCAAGCTGGCTCGCATCCGCAACGGTGGTGAGAT
CTGGAACATCTTCTTCGGCGGTCGCTATATCATTCTGCTGATGGGTCTGT
TTGCCATGTACACTGGTTTGGTTTACAACGATGTCTTCTCCAAGTCGATG
AACCTGTTTGGATCACGTTGGTTCAACAACTACAACACAACGACTGTCCT
GACCAACCCGAATCTGCAGTTGCCGCCCAACAGCTCCGCCGTGGGTGTCT
ATCCCTTCGGAATGGATCCCTTTCAAGATGAAGCTCTCGATCATCTTCGG
AGTGCTGCACATGGTCTTCGGCGTGTGCATGTCGGTCGTTAACTTCACCC
ACTTCAAGCGTTATGCCTCCATTTTCCTGGAGTTCGTGCCCCAAATTCTG
TTCCTGCTACTGCTCTTCGGCTACATGGTGTTCATGATGTTCTTCAAGTG
GTTCAGCTATAACGCTAGGACTAGCTTCCAGCCAGAAACTCCTGGATGCC
CTCCCTCCGTGTTGATCATGTTCATCAACATGATGCTGTTCAAGAACACT
GAGCCACCAAAGGGTTGCAACGAGTTCATGTTCGAGTCACAGCCCCAGTT
GCAGAAGGCCTTTGTGCTCATCGCCCTGTGCTGCATTCCTTGGATGCTTC
TGGGCAAGCCCCTGTACATCAAGTTCACTCGCAAAAACAAGGCTCATGCC
AATCACAATGGTCAGTTGACCGGCAACATTGAACTGGCCGAAGGCGAGAC
TCCTCTGCCCACAGGATTCTCTGGAAACGAGGAGAATGCCGGGGGTGCCC
ATGGCCATGACGATGAGCCCATGAGCGAAATCTACATCCATCAAGCCATC
CACACCATCGAATATGTGCTCAGTACCATCTCGCACACGGCGTCCTATCT
GCGTCTCTGGGCTCTGTCCCTGGCTCACGCCCAGCTCTCCGAGGTGCTGT
GGCAAATGGTGTTGTCCCTGGGCCTTAAGATGTCCGGCGTGGGCGGTGCC
ATTGGTCTGTTCATCATCTTCGGCGCCTGGTGCTTGTTCACCCTGGCTAT
CCTGGTCCTCATGGAGGGTCTGTCCGCCTTCCTGCACACTCTGCGTCTGC
ACTGGGTGGAGTTCATGAGCAAGTTCTACGAGGGAATGGGCTACGCCTTC
CAGCCGTTCAGCTTCAAGGCCATTCTCGATGGCGAAGAGGAGGAGTAAAC
CCATCCAAATGTGCTCAAACTAG
>BcDNA:LD21735|FBgn0027516
MGDMFRSEEMALCQMFIQPEAAYTSVSELGETGCVQFRDLNVNVNAFQRK
FVTEVRRCDELERKIRYIETEIKKDGIVLPDIQDDIPRAPNPREIIDLEA
HLEKTESEMIELAQNEVNMKSNYLELTELRKVLENTQGFFSDQEVLNLDS
SNRAGGDNDAAAQHRGRLGFVAGVINRERVFAFERMLWRISRGNVFLKRS
DLDEPLNDPATGHPIYKTVFVAFFQGEQLKNRIKKVCTGFHASLYPCPSS
HNEREEMVRNVRTRLEDLKLVLSQTEDHRSRVLATVSKNLPSWSIMVKKM
KAIYHTLNLFNMDVTKKCLIGECWVPTNDLPVVQKALSDGSAAVGSTIPS
FLNVIDTNEQPPTFNRTNKFTRGFQNLIDAYGVASYRECNPALYTCITFP
FLFAVMFGDLGHGLILVLFGAWMVLCERKLARIRNGGEIWNIFFGGRYII
LLMGLFAMYTGLVYNDVFSKSMNLFGSRWFNNYNTTTVLTNPNLQLPPNS
SAVGVYPFGMDPFQDEALDHLRSAAHGLRRVHVGR
>BcDNA:LD21735|FBgn0027516
MGDMFRSEEMALCQMFIQPEAAYTSVSELGETGCVQFRDLNVNVNAFQRK
FVTEVRRCDELERKIRYIETEIKKDGIVLPDIQDDIPRAPNPREIIDLEA
HLEKTESEMIELAQNEVNMKSNYLELTELRKVLENTQGFFSDQEVLNLDS
SNRAGGDNDAAAQHRGRLGFVAGVINRERVFAFERMLWRISRGNVFLKRS
DLDEPLNDPATGHPIYKTVFVAFFQGEQLKNRIKKVCTGFHASLYPCPSS
HNEREEMVRNVRTRLEDLKLVLSQTEDHRSRVLATVSKNLPSWSIMVKKM
KAIYHTLNLFNMDVTKKCLIGECWVPTNDLPVVQKALSDGSAAVGSTIPS
FLNVIDTNEQPPTFNRTNKFTRGFQNLIDAYGVASYRECNPALYTCITFP
FLFAVMFGDLGHGLILVLFGAWMVLCERKLARIRNGGEIWNIFFGGRYII
LLMGLFAMYTGLVYNDVFSKSMNLFGSRWFNNYNTTTVLTNPNLQLPPNS
SAVGVYPFGMDPFQDEALDHLRSAAHGLRRVHVGR
Scim34
AE003725 (insertion @69750), nearest ORF (CG5557) @69916
The EST GH22029 has 73% identity with Zn finger transcription factor, 89%
identity with CG1004O gene product
>>1(3)02102|FBgn0010768|cDNA sequence
TGAACACGAACAGTTATTCTAGCTCCTCCTGTTCTGCTGCTTCTGTTGGT
GTTTTTTTGCGTTTGCCGCGACGTAAACAACCGAAGAGCGGAGCTTACGC
CCCCAACTGCTCCAGCTCCACGCCCCCCTCGCAACGTGTTCGTTGTAAAT
GCAATTAATCGTTGTTGGTCGCTGAAAAAACTAATATTTCGGGAGTCCGA
TACAAGAAGGGCAAAAAAGCACAAGTGCAGAAAAAGCAAAAAAAAACATA
AGCTTGCCGTGTGTGTGCGTTGGTGTGTGTGTGTATTTTTGGCGTGCGCG
GCCATTTTTTCTTGTTGCCACTCGAGAGTCTCTTCTGTGTGCGAAAGAGA
GGCCCGACGGCAAAGCAGAACGTAGCAAACTACGCAAATCCCCACTAAAT
TCGCTAATTTTCGCTAAATAAATCAATCGCAAGGGGTGCCCAAAAACAAA
CAAAAGTACGAAAATAGAGTGCCGCAGACCACAAACAAATCACCTGCGCC
AGTGTGTGTGAGTGTGTCAGTGTGCGAAACAGGCAAGCTCCCAGGCGGGC
TCCCACCCACAATCAGTCGGCGAACACGTGCTCCAAAATATCAACAAAAG
TTGGCCCACAAACATAAAAAAGGGGGCCGCGACTGCATCCGAGACCCGAA
CGCCGGAACACAAAAGGCACTTTCAAATTGCACAAAAACGCGCCGAGTTG
TGTAAGCCCGCCGCCAGTGAAGTGTCGACTTCCCGGCGACGAAGACCGCA
GCAATATTTCCACTAGCCAGTAACGCACAGGCTCGTTCCGCCGCTGACGA
CGACCCCAAACTGGACGCCCGCACCATCGCCTACCGCCCGCTGACCCTTC
GCGGCCACCAGACGCCGCTTATGGCCGAACTGCCGACGGCGCCGAACGGC
GTCCCCAGCGGCGATTATCTGCACCGCTCCATCGATCAGCTGCGTTCGCT
GGGTCATCTGACCACCGCCCAATTGGTTCACGACTACAAGCCCTTCAACA
TTAGCGAATTCCGGCAGAATGTCGCTGAGCGACTGGACTACTCGCTGAAG
AACGGCCTGGTGCAGCACCAACAGCAAATGGTCATGGAGCAGCAGCCACA
TCCCGATCAGCAGCAGCAGCAGCATCTGCATCACCCGCAACAGCAGCAGC
ACCCGCCGCAGCTGAAGGTCAGCTACAGTGCGCCCAACTCGCCGCCCACT
CCACACGAGCAGCAGGAACAGAAGTACGACCCGAATCGATCGCCGCCGCG
TCAGCAGATGAGCAGCGCTAGCGGCAGTGGCAGCAACGGCTCCTCGCCTG
AGGAGGAAAGCCGACGGGGAGACGGTGATCAGGCCAAGCCCTACAAGTGT
GGCTCGTGCAGCAAGTCCTTTGCCAACTCCTCGTACCTGTCGCAGCACAC
GCGTATCCACCTGGGGATCAAGCCGTACCGCTGCGAGATATGTCAGCGCA
AGTTCACGCAATTGTCGCATCTCCAGCAGCACATCCGTACGCACACGGGT
GACAAACCGTACAAATGCCGGCACGCCGGCTGCCCGAAGGCCTTCTCGCA
GCTATCCAATCTGCAGTCACACTCGCGTTGTCATCAGACGGACAAGCCGT
TCAAGTGCAACTCCTGCTACAAGTGCTTCAGCGACGAGATGACCCTGCTG
GAGCACATTCCCAAGCACAAGGACTCCAAGCACCTGAAGACGCACATCTG
CAATTTGTGTGGCAAATCGTACACGCAAGAGACCTACCTTCAGAAACATC
TGCAGAAGCACGCAGAGAAGGCGGAGAAGCAGCAGCATCGCCACACGGCC
CAGGTGGCTGCCCACCAGCAGCACGTACCGGCGAGCGGCATCGGCTTGAA
TTTGCAGCGCCAGGCCATGAACGATGTGAATGCCGCATATTGGGCCAAAA
TGGGCGCAGACAGTGCGGCGGCTTCGCTGGCGGAAGCCATTCAGCAGCAG
TTGCCGCAGGCCGGCGAATAAAGATTGTAACTATATATAAAAGT
>1(3)02102|FBgn0010768
MAELPTAPNGVPSGDYLHRSIDQLRSLGHLTTAQLVHDYKPFNISEFRQN
VAERLDYSLKNGLVQHQQQMVMEQQPHPDQQQQQHLHHPQQQQHPPQLKV
SYSAPNSPPTPHEQQEQKYDPNRSPPRQQMSSASGSGSNGSSPEEESRRG
DGDQAKPYKCGSCSKSFANSSYLSQHTRIHLGIKPYRCEICQRKFTQLSH
LQQHIRTHTGDKPYKCRHAGCPKAFSQLSNLQSHSRCHQTDKPFKCNSCY
KCFSDEMTLLEHIPKHKDSKHLKTHICNLCGKSYTQETYLQKHLQKHAEK
AEKQQHRHTAQVAAHQQHVPASGIGLNLQRQAMNDVNAAYWAKMGADS
AAASLAEAIQQQLPQAGE
Scim35
AE003732 (insertion @29310), no genes nearby. The nearest ORFs are CG15690
@5954 to 6364 and CG17838 @42621 to 55761
22 >CG15690|FBgn0038825|cDNA sequence
TGACTGATCTGTCGCCGACCACCTCTGGGTTTCTACATGGCCATGGCGG
CGCCAACGCACAGCATCACCAGCAACTTTTGCACCACCAACAGCAGCAGC
ATCAGCAGACCCACCAGCAGCACCTCCAGCAGCAGTACCACCACCGGCAG
CACTCGCTCCACCAGCAGCACCTGCAGCGCCAGCACTCGCACACCTCGCT
GACCAAGATCCACCGCCAGAGCAGCAGCCACAGCGTCCACGGTGGTGGCG
GGCGGGCGGATCACCACCGAACCACTACCGGAGCCACCGGACGGCTCTTC
TCCTACTTCGGAAACGAGCAGGATCACGAGCGCAAGAAGTCGGAGACTTC
GTTCTTTAATCTCGGATTTCGGAGGAAGTCCACTGTGGTCTACTACGCTC
CAGCGGATTGA

+UZ,/14 >CG15690|FBgn0038825
MTDLSPTTSGFLHGHGGANAQHHQQLLHHQQQQHQQTHQQHLQQQYHHR
QHSLHQQHLQRQHSHTSLTKIHRQSSSHSVHGGGGRADHHRTTTGATGRLF
SYFGNEQDHERKKSETSFFNLGFRRKSTVVYYAPAD
>>CG17838|FBgn0038826|cDNA sequence
ATGGCGGAAGGTAATGGCGAACTGTTGGATGACATTAACCAGAAAGCCGA
TGACCGTGGCGATGGCGAGCGTACAGAGGATTATCCCAAGCTGCTGGAAT
ACGGTCTGGACAAGAAGGTCGCCGGCAAACTGGATGAGATCTACAAAACC
GGCAAGTTGGCTCACGCCGAGCTGGACGAGCGCGCCCTGGACGCGCTCAA
GGAGTTTCCCGTCGATGGTGCCTTGAATGTGTTGGGACAGTTCCTGGAAT
CGAACCTGGAGCACGTGTCAAACAAGTCCGCCTACCTATGCGGCGTGATG
AAGACGTACCGACAGAAGAGTCGAGCCAGCCAACAGGGCGTGGCCGCGCC
CGCAACTGTCAAAGGTCCCGACGAGGACAAGATCAAGAAAATCCTCGAGC
GCACCGGCTACACATTAGATGTGACGACAGGTCAGCGTAAATACGGCGGA
CCGCCGCCGCATTGGGAGGGAAATGTGCCAGGCAACGGTTGCGAGGTTTT
CTGCGGCAAGATACCCAAGGACATGTACGAGGACGAACTGATTCCGCTAT
TCGAGAACTGCGGCATAATCTGGGACCTACGACTCATGATGGACCCGATG
ACGGGCACAAATCGTGGTTATGCATTTGTCACATTCACAAATCGCGAAGC
GGCCGTCAATGCAGTGCGACAGCTCGATAATCACGAAATAAAACCCGGCA
AGTGTCTAAAAATAAATATAAGCGTACCGAATCTGCGCCTTTTCGTAGGC
AATATTCCCAAGTCAAAGGGCAAAGATGAAATTTTAGAGGAATTTGGTAA
ACTTACAGGCAAAAAGATTGGTGTTACGATATCATTTAACAATCACCGGC
TATTTGTCGGCAATATACCTAAGAATAGAGATCGCGACGAATTAATTGAG
GAATTTTCAAAACATGCACCTGGCCTATACGAGGTAATCATATACAGTTC
GCCAGATGATAAGAAAAAGAATCGCGGCTTTTGCTTTCTTGAGTACGAGT
CACACAAGGCGGCGTCTTTGGCCAAACGAAGACTTGGCACAGGAACAATT
AAGGTTTGGGGATGTGATATAATAGTCGACTGGGCCGATCCACAGGAGGA
GCCGGATGAGCAAACAATGTCCAAGGTTAAAGTTCTTTATGTGCGAAATC
TTACCCAGGACGTCTCAGAGGATAAACTGAAGGAACAATTTGAGCAATAC
GGAAAAGTGGAACGCGTTAAGAAAATTAAAGACTATGCCTTTATACACTT
TGAGGATCGTGATAGCGCCGTCGAAGCTATGCGTGGCCTTAATGGCAAGG
AGATCGGCGCCTCGAATATTGAGGTCTCTCTAGCCAAACCCCCCTCGGAC
AAAAAGAAAAAGGAGGAGATTCTGCGTGCTCGTGAGCGCCGCATGATGCA
AATGATGCAAGCGCGTCCCGGGATCGTGGGAAACCTGTCGCCGACACATC
CTAGCATAATGTCCTTGACGCCCATGCGCCCAGGGGCGCGCATGCCGCTG
CGTACGCCGATACCCCGTGAATACGACTACTTTTACGACTTTTTCGGTTT
CTCGGACTATCGCCAAGGGGGGTCCTTTGGCAATAATGTGTCCTACTACG
ATGACATGTACCGCTGGATTGATGGGGATTACAACTACTATGATTACCCG
AACGGTGGCGGCGGGGGCAGCGGGGGAGGAGGAGGTAGTGTGTCCGGCGG
TACGGTGCTTCCGCTCTCGGCCGGCGGCTCCCAGAATTCACCGATGGCTA
GTGGACAGCGATCGGCCAGAGGATCGGCCAGTGGTCCCAGTGCTTCCCCG
AGCCTTATGCTGGAGCTGCATTCAAAACATTCATGGAGGGTAATTAAGCG
TAGCTCATCGGCCACCTCCTTGGACAGCGACAAGAGTCGCTCTCCGGGGA
AGAAGCGTAAAGTCCATAGGTCACATAACAAAAACAAGTCACACAAGTCT
AAGAAGCATGCCCACAAGTCCAAGTCGTCTCGGCCCGATAAAGAAAAGAA
ATCCAAGCGGAAGTCCGAATAA
>CG17838|FBgn0038826
MAEGNGELLDDINQKADDRGDGERTEDYPKLLEYGLDKKVAGKLDEIYKT
GKLAHAELDERALDALKEFPVDGALNVLGQFLESNLEHVSNKSAYLCGVM
KTYRQKSRASQQGVAAPATVKGPDEDKIKKILERTGYTLDVTTGQRKYGG
PPPHWEGNVPGNGCEVFCGKIPKDMYEDELIPLFENCGIIWDLRLMMDPM
TGTNRGYAFVTFTNREAAVNAVRQLDNHEIKPGKCLKINISVPNLRLFVG
NIPKSKGKDEILEEFGKLTGKKIGVTISFNNHRLFVGNIPKNRDRDEIIE
EFSKHAPGLYEVIIYSSPDDKKKNRGFCFLEYESHKAASLAKRRLGTGRI
KVWGCDIIVDWADPQEEPDEQTMSKVKVLYVRNLTQDVSEDKLKEQFEQY
GKVERVKKIKDYAFIHFEDRDSAVEAMRGLNGKEIGASNIEVSLAKPPSD
KKKKEEILRARERRMMQMMQARPGIVGNLSPTHPSIMSLTPMRPGARMPL
RTPIPREYDYFYDFFGFSDYRQGGSFGNNVSYYDDMYRWIDGDYNYYDYP
NGGGGGSGGGGGSVSGGTVLPLSAGGSQNSPMASGQRSARGSASGPSASP
SLMLELHSKHSWRVIKRSSSATSLDSDKSRSPGKKRKVHRSHNKNKSHKS
KKHAHKSKSSRPDKEKKSKRKSE

Scim36
AE003758 (insertion @217925), nearest ORF (CG6295) @217933
>>CG6295|FBgn0039471|cDNA sequence
ATGATGAAACTGTTCCTGGCCTTGGCCTTTTGTGTCCTGGCGGCTAATGC
CGTGGAGGTTCCTGTGAATGGTGAGAACGGATGGTATGTGCCCCAGGCCC
ATGGTACCATGGAGTGGATGGACCGCGAGTTCGCCGAGGCCTATTTGGAC
ACCAAGAACCGCATGGAAGGACGCAACGTCCTGAACCCCGTCACCTTCTA
CCTGTACACCAACTCGAACCGCAACTCTCCCCAGGAGATCAAGGCTACGT
CAGCATCGATCTCTGGCTCGCACTTCAACCCCAACCACCCCACCCGCTTC
ACTATCCACGGCTGGTCCTCCAGCAAGGATGAGTTCATCAACTACGGTGT
CCGCGATGCCTGGTTCACCCACGGCGACATGAACATGATTGCCGTCGACT
GGGGACGTGCTCGTTCCGTGGACTACGCCTCCTCCGTTCTGGCTGTTCCC
GGAGTCGGCGAGCAGGTGGCTACCCTGATCAACTTTATGCGCAGCAATCA
CGGCCTGAACCTGGACAACACCATGGTGATTGGTCACAGCCTGGGCGCCC
ATGTCTCGGGCTATGCTGGCAAGAATGTGAAGAACGGCCAGCTGCACACC
ATCATTGGTCTGGACCCCGCCCTGCCCCTTTTCAGCTACGATTCCCCCAA
CAAGCGCCTGAGCTCCACCGATGCTTACTACGTGGAGTCCATCCAGACCA
ACGGAGGAACCCTGGGATTCCTGAAGCCCATCGGCAAGGGAGCCTTCTAC
CCCAACGGAGGAAAGAGCCAGCCCGGATGTGGTGTTGATCTCACCGGATC
CTGCGCCCACAGCCGCTCAGTGATCTACTACGCCGAGTCCGTGACCGAGA
ACAACTTCCCCACCATGCGCTGCGGCGACTACGAGGAGGCTGTGGCCAAC
GAGTGCGGTAGCTCCTACAGCTCCGTCCGCATGGGAGCCACCACCAATGC
CTACATGGTCGCTGGAGATTACTATGTACCCGTCCGTAGCGATGCTCCCT
ACGGAATGGGCAACTAA
>CG6295|FBgn0039471
MMKLFLALAFCVLAANAVEVRVNGENGWYVPQADGTMEWMDREFAEAY
LETKNRMEGRNVLNPVTFYLYTNSNRNSPQEIKATSASISGSHFNPNHPTRF
TIHGWSSSKDEFINYGVRDAWFTHGDMNMIAVDWGRARSVDYASSVLAVP
GVGEQVATLINFMRSNHGLNLDNTMVIGHSLGAHVSGYAGKNVKNGQLHT
IIGLDPALPLFSYDSPNKRLSSTDAYYVESIQTNGGTLGFLKPIGKGAFY
PNGGKSQPGCGVDLTGSCAHSRSVIYYAESVTENNFPTMRCGDYEEAVAK
ECGSSYSSVRMGATTNAYMVAGDYYVPVRSDAPYGMGN
Scim37
AE003764 (insertion @56595), nearest ORF (CG12425) @48242 to 49549
>>CG12425|FBgn0039571|cDNA sequence
CAGCGCCTCCGAATTTTGGCCAATGCGTGTGCTCCTGGCGTTCAATGCTG
ACCATGTCGACCCTGATGATGCCAGCACCGACCATAGCCATGGGTGCCCC
GCAGATCACAATGGGTCCGCACAAGCCGCCGGAAACGAAGCTGTTGGCC
ATCCATCCCGCTGCAGCGGCCGCAGCAGCCGCCCAGCAGCAGCAGCAGTC
GGTGA
>CG12425|FBgn0039571
MLTMSTLMMPAPTIAMGAPQITMGPHKPPETKLLAIHPAAAAAAAAQQQQ
QSV

[0135] TABLE 5
DNA and AA sequences for known loci

Fim^{Scim}
>>Fim|FBgn0024238|cDNA sequence
CAACCTGCAATTTAGTTTTCTGTTTCTTGTTAAACATCTAACAAAAGCGC
TTCGCACGCACAGCAAACCGGTCGATTCCGAATTCAGACGTGCTAAATA
A
CGTTTGAAAACAAAATTTGCTCGGTTGACGTTGTAAATAACAACACGGA
G
GCTTTAAATCTGGCTTCATCTTTTTTTTTTTGGTAAAAACCAGCAACAAA
CAAAACCAGCAACGAGTGTGTATGGGTGAAAAGTTAAGAAAAAAGTAA
AA
GAAGTTTAAGAATATTAGCACAGAAACGCACAAATACATAGATACGTAT
A
GGAAAAGGAGCGCGCGGTAAAACAAAAAAGAAGAGGAGCAAAAAGAA
GAA
AATCGCCGACTGCGAAAACGGCGACAAAGTGAAATTGATTATAAACGG
AT
AATTTATTTAAAATAATTACCAATCAGCGGCGTCAGTTATAAATAATTAA
GAAAGTCAAGAAGAAAAGCAGCAGCAGCACACCACACACACATCGGCA
GC
GAAAATGGCAACACTTAACAAATTCACAAAAACGCTGTCCATTGATGAA
A
AGGCGGAGATCAAGGAGAAATTCATAGAGTTGGATGCCAACAAAGATG
GC
TTCATCGATCTGCACGAGCTAAAGGATGCCCTCAACCAGGTGGGCTTCA
A
GCTGGCCCGGCTACCAGGTGCGCGAAATGATTGACGAGTACAAGGGCAA
AC
AGCTGACTGCCTTCCAGGGCAAATTGAATCTGGAGGAGTTCGAGGCACT
G
TGCCTGGACCTGAAGAGCAAGGATGTGGCCAGCACATTCAAGACGGTCG
T
CTCCAAGAAGGAGAACTTGGAGACCCTGGGCGGCATGTCGAGCATTTCG
T
CGGAGGGCACCACCCATTCGGTGCGCCTCGAGGAGCAGCTGGCCTTCTC
C
GACTGGATTAACTCGAATCTGGGCCACGACAAGGATCTGCAACATCTGC
T
GCCCATCGATAGCGAGGGCAAGCGCTTGTATCTGAGCATCAAGGATGGT
A
TTCTGCTGTGCAAAATTATCAACCACTCCTGCCCGGACACAATCGATGA
G
CGTGCGATCAACAAGAAGAACCTCACCGTCTACCGGGAGTTTGAGAACT
T
GACCCTGGCCTTGGTTTCCTCCCAGGCGATTGGATGCAACATCGTAAC
A
TCGATGCCCACGATCTGGCCAAGGGCAAGCCACATCTGGTGCTGGGTCT
T
CTCTGGCAGATCATCCGCATCGGTCTGTTTAGCCACATCACCCTGGACAG
CTGTCCGGGATTGGCTGGCCTACTCTTCGACAACGAACGTCTCGAGGAT
C
TGATGAAGATGTCGCCGGAGGCCATCCTTTTGCGTTGGGTCAACCATCAT
TTGGAGCGAGCCGGCATCTCGAGGCGGTGCACCAACTTCCAGTCGGACA
T
CGTCGATTCTGAGATCTATTCGCATTTGCTGAAGCAAATTGCCGGCAATG
ATGCTGATGTCAATCTGGATGCCCTGCGGGAATCCGATCTGCAGTCGCG
C
GCGGAGATCATGTTGCAGCAGGCCGCCAAGCTCAACTGCCGCAGCTTCC
T
CACGCCACAGGATGTCGTCAACGGAGTCTACAAACTCAATCTAGCCTTC
G
TGGCTAATCTGTTCAACAACCATCCAGGATTGGACAAGCCCGAGCAGAT
C
GAGGGACTCGAGTCCATTGAGGAGACGCGCGAAGAGAAGACCTACCGC
AA
TTGGATGAACTCAATGGGCGTGGCACCGCACGTGAACTGGCTTTACTCC
G
ATTTGGCCGATGGTCTGGTCATTTTCCAGCTGTTCGACGTCATCAAGCCG
GGTATTGTCAACTGGAGCCGTGTGCACAAGCGTTTCAGCCCGCTGCGCA
A
GTTCATGGAAAAGCTGGAGAACTGCAACTATGCGGTGGATCTGGGCAAG
C
AGCTCAAATTCTCGCTGGTCGGAATCGCAGGCCAGGATCTAAACGATGG
C
AATGCCACGCTGACGTTGGCTCTCATCTGGCAGCTTATGCGTGCCTACAC
CCTGTCCATTCTGTCCCGCTTGGCCAACACTGGCAACCCCATTATCGAGA
AGGAGATCGTCCAGTGGGTGAATAACCGACTGTCGGAGGCAGGCAAC
AG
TCGCAGCTGCGTAACTTCAACGATCCGGCCATCGCCGATGGCAAGATCG
T
GATCGATCTGATCGATGCCATCAAGGAGGGCAGCATTAACTACGAGTTG
T
GATCGATCTGATCGATGCCATCAAGGAGGGCAGCATTAACTACGAGTTG
G
TGCGCACTAGCGGAACACAGGAGGATAACCTGGCCAATGCCAAGTATGC
C
ATCTCCATGGCCCGCAAGATCGGCGCCCGTGTCTACGCCCTGCCCGAGG
A
CATCACCGAGGTGAAGCCGAAAATGGTGATGACCGTTTTCGCCTGCATG
A
TGGCCCTCGACTACGTGCCCAACATGGACAGTGTGGACCAGAACAACCA
C
AACAGCTCCGCCAACAACAGCAATTAGGCGCCATAGCCACAACTCATTT
A
TACATAAACAAAAGGATGGGATTTTGAAAGGGAAGAACAGAGTGGGAA
CT
ACGTAAATTTGTCGTATTCGCTAATTACTAATAACTCTATTCGATTGCGT
TCCTTCCTGCGCTACCAATACATTTTTGTGTTTTTTTTTTATTTCAATTA
CTTTTTGTAATTTTTTTATTATATATTTATATATTATATAATTGAGTATG
AGTTTCCCCCTATTGTAATTAAGCAAACAGATTTTAGAGTGTCGCACATC
TGTTTTCGAGCCCGGCGGGGTGTTTCTTAATTAGTTTTGTTTAACAATTG
ATTAATTATACAACTGTAACCTTATTTTATAAATAAAGGTTTAGCTTGTT
CCGCTTAAAATCCTTAAAAGAAAAGAATGGTGAAACAAAAGAAAGAAA
AA
AAAAGCGACTTGTGCAGGATTAAGAAAGAATTATAATATTAACATTGCG
A
CG
>Fim|FBgn0024238
MATLNKFTKTLSIDEKAEIKEKFIELDANKDGRIDLHELKDALNQVGFKL
AGYQVREMIDEYKGKQLTAFQGKLNLEEFEALCLDLKSKDVASTFKTVVS
KKENLETLGGMSSISSEGTTHSVRLEEQLAFSDWINSNLGHDKDLQHLLP
IDSEGKRLYLSIKDGILLCKIINHSCPDTIDERAINKKNLTVYREFENLT
LALVSSQAIGCNIVNIDAHDLAKGKPHLVLGLLWQIIRIGLFSHITLDSC
PGLAGLLFDNERLEDLMKMSPEAILLRWVNHHLERAGISRRCTNFQSDIV
DSEIYSHLLKQIAGNDADVNLDALRESDLQSRAEIMLQQAAKLNCRSFLT
PQDVVNGVYKLNLAFVANLFNNHPGLDKPEQIEGLESIEETREEKTYRNW
MNSMGVAPHVNWLYSDLADGLVIFQLFDVIKPGIVNWSRVHKRFSPLRKF
MEKLENCNYAVDLGKQLKFSLVGIAGQDLNDGNATLTLALIWQLMRAYTL
SILSRLANTGNPIIEKEIVQWVNNRLSEAGKQSQLRNFNDPAIADGKIVI
DLIDAIKEGSINYELVRTSGTQEDNLANAKYAISMARKIGARVYALPEDI
TAVKPKMVMTVFACMMALDYVPNMDSVDQNNHNSSANNSN
bif^{Scim}
>>bif|FBgn0014133|cDNA sequence
TGTATTGGAAACGCGGCTTAACTTAATGCAGATTTTTCCGCTGATTCGGC
TGCGAAAGATGCACTTTTAAGGCGCAGCGAGTGCACCCACGCCCCGAGT
T
CGAGTGCAGTTGCAGTCGGGAAAGCTTGACAAGTGCGCGGAGCAAGGA
GA
GCGACGAGTTCGTTGAGCTACAGCGAAACGGAAAAGTGTAAAAGCGGG
GT
AAACAGGCGCAGCGGAGCGGATGATAAACGGAACTCGGGATCGGAAAA
TT
GGAAGCAAAACCAACCACCGATTATAAAAAATAGTCAGCATCTTAAAAA
C
TTGGTCTTTGGGTCGAGATGTAGAGCTGGATAGTGTGCCACACTATATAG
GGGATACTACTGCGATACAGACACCGCGGACACGGCTGACATGCATTAA
T
GCTGCGAATAATGCCTATTGCAGACGGGGATAATGGAGTCACAGAAGCG
G
CCTTCGTTGGACTTACACACGGATGTGCCAGCAGGATTAGCAGCTGGAG
G
ATCTGGCCTGGGAGCTGCAGCTGAGATGTCGCCCACTTCCGGTTTCCTGC
CGGACATGCCGCAGTGGAAGAAGGACCTCATCCAGCGCCGGAAAACGA
AC
GTGGCCCGCACCCAGGCGGCGTCCATCACCTCGCCCACCGATGGCAGTT
AC
GTGGCCCGCACCCAGGCGGCGTCCATCACCTCGCCCACCGATGGCAGTT
G
TGGGGCTTTGGCAGAAGCCAACGCAGCTCCAGGTGCAATTGCAGATTTC
A
CAGAACCGGCGACAATCAGTAGCACTAGTCAAAAGAGAAACATGATCG
GT
TCAGAGGAAAAGTCTGAGAAATCTTCTATTTCCAATACCAATTCCGATTC
CACTGGAGGTCATCACTCTGTTGTTGCCGTCTCCCTTTCGCCCGATGCGG
CAGCAACAACAAATGTAACAGTAACACCAATACCAAAGCAGCGATCGA
GT
TTACTCAACACAAGAAGTCAGGAGAGGGAGATGGTGCGATATATTCTAA
G
CGAGAGTGGAGAACGGGATGGAGAGCTTGAGAGCGGCGAACAGCCGGC
TG
GTGTGGTGAGTAACAGCCGGTGCGGTGAAGTTGAAACTGGCACAATTGG
A
TCGCCGTCGTCGTCAGCAAATCAAAATCCAAACCCAAATCATTTAAAAA
C
GAAATGCAAACCGGGACAGAGCGTTGCTGAGGGCAAGCCTTCAGCTAA
AG
AGACCATCGTCGATAACAGCAAAAGCTGCAGCAAAACCAAGAGTATTTC
C
GATAAATTGCAGAGCAACAAGTTTATAATTCAACAGCAGCAGCAACAAC
A
ACAACAACAGCAGCAACAACAGCAACTGTCGCCCACAAAGGTAACGGT
AA
AACCGACAATGGTCGCCATGCAAGAGATGAAGAAGACAACCAAACAAA
AT
GGCCAGCACCGACATCTAGCGGGCAAAATTGGCAGCGTAGCAGGAGGC
GA
TGTGGATCCACAACATCCACCGACGAATCCCATACCAGATTCATTGGAC
A
CCGGTGAGGATCTGAGCTACGCACCCGGAATTGTGTCCAAGCTGCGATG
G
CGCTACTTGAGCCTGGCCCTTCGCGAGTCCCGCCAGCAGAGCAGCAAAC
A
ACGCCTCCAACGCTCCACCAGTCTGAACACCCTGCTCGACCGCGACGAT
G
ACGAGGTGGAAGTGGAGGAGCCCGAAATGACCAACAGCCAGGTGCGTG
CC
AAATCAACACCGCCACCGATATTGGGGGCAAAACCGACACCGAAACCC
AG
CAGCCAGCATCAGCGTCCCGTCAGTCTGGGCGCCAATGGAGCTGGATCA
G
CTGTTAACCCGCCCTCGAACTCGGATCAGGCCCAAACGGGCGCCGTTGC
C
AACGGAGGCGCAGGATCTGGCCAACGTCGCGTCACTTTAAGCGCGGCA
A
CGAGGTGATGAAGCGGGCACGTTCCGTGGAGGCTCTGCTCTGCGAGAAA
T
CGCCATGGAACAGCCAGAGAATCAGCACTGCCGGCGCAGCTGCAGCAG
CA
GCACCTTCACCACCTGCTCCCAAGGCCACAGCCGCTGCTCCCTCACCTGT
TACATCGCCCACCTGCGTTACCATCGAGGACAAGATCCACAATGCCCGC
G
AACGACTGCACAGCGGGACGGATACGGCGCCACCCAAGCGTCTGACCT
C
ATCATCGATGACACCGAGCGGCCGCCACCGGATCTGGTCAAGCAGACGC
T
CAAGATGTTTGAGGCGAGTGCTAATCGACGACCGCGCGCAGCCCATCGT
T
CCAATGGTGTTGGCGGAGTGGCCAGCAAGGTGGCCAACTACAAATCGAT
C
ATTAAGGATCAGAAGCAACCATCATCAGCAGCGGCGACGCCACCGCCG
AC
CGGCATGGGTTTTGCCTCCTCAACGCCGCTAAGGCATGTCCATCCGGATA
TTATACCCCGTCAGGTGGATTCGCCCGTATCGGCGTTGAGTGTAATGATG
CGTCGCATGGAGCTGCAGGAGCCCGAGACGCCGGAAAGGGAGACACGG
GA
CGCGGAGGCCACACCGCAGAGCGAGGCGCTAAGTGAGACTGAGCGAAA
TG
ATCGCGATGAAGGCGATGGCGAAGTCGATGACGACAACCACAACAACA
AC
GACGACGATCACGACGACGGCGACGACGGCAGCGACAACAATGAGCAA
CG
CGATAAAATGGGCGCGGCGGCGGCAGGCGATAAGCCTAAGCCCCCAGC
GG
AATCGGCAGCGGGAGGCGCCCAACGATCATTCGCTGCCTCGACGGAGAA
C
GCGCATGTAGCCAGCGGTAGTAGCAGCAGTACCAGTGCCAGTGTACGGA
A
GCTCAGCAACAACAACGACTCCAGCAGCGGACCAGCGGTGACCAAACA
GA
TCGGTGTCATCCGTCCGCTATTCAATAGCCAGGGAGCCGGGAGCACGCC
G
CTAACGAGTCGCGAGATCGAAAAGAATCGCATCAATGAGATGAAGAAG
TC
GACGGCCACAGATGCCGGTGGTTCGGTATCCGGATCCGGAACGGTTGCT
G
GTGCTGGATCAGGAACCTCGCCCACCACTAGTCTCGACAGCGTGATAAA
C
ACCAAGGAAGCGGCCAGCAGCGAAACGGATGCCAGTGCCTCGCCACTG
TG
GACATTGCGCAAGCTGAGGAATCAGAGCCAGACGGCCGGCGGAGGATC
GG
GTCCCAGTTCGAGCCTTCATTCCACAGAGAACACCTCGATGGTGTTCAAC
TTTTCCAAGAGCACCAAGGAAGTGCCCGACTACATCGAAAGCGACGTTG
T
GATTTACAGGCGCAAGCGGGAGCTGCCAAAGCCAAATGAACCTGGCTTC
G
TGCTCCTGGGCGATCTCTCCGTGGAGACGTCGACGGACACGGACTACGA
C
GACTACTCCATGTGCCCGCCATCGCCGTGCGATGTGGAGTTTGAGAATG
C
CAACATTGTGATCGACGGCAAGTCCAGCATACGCCAGAAACCCAAAGA
GT
CTTCGTTCCGCGTGCAGTTCAACGACACGCTGACGTCGACGTTTGAATAC
CCCTCCGAGGCATCGATGACCATCGAGGATCCGCCGTACGCCGATCCCT
T
TGGCCATGTGAGCAAACACCATCAGATGCTGCTCGCCGAGCAGATGCAT
C
TGTTTGCAGCACCAGGAGCAGCTGGAGCTGGAGCAGATGCACCAGCTGG
GG
CTGGCGCCGGAGCAGCACCATCATGTGACCGTCGACGAGATCATCGAGC
T
GCCCACATCGACGGCGGGACATGGACATGGCATCGGACTTGGACACAG
GT
CGGGGGCGGCGGGGGGCGGTGGCACGATGCTGGGGAATTTACCGTTGG
AT
ATTATTTAAATGTAACAGAATACATAAGCAAAGCGTTGAAATAATATCT
A
TTGTATACCAAAACCAAAAATATCTATGATAACAAACAAGCAAAGGCAA
T
TAAACCGATCCGTAAACTGAATAACCGATTAATAACTGCAGCCGCTCAA
C
CCGAACCGCAATAAATAACTATCAAGTAAAGAATAGAACAACTTAACAA
T
GAAAAATGCAATATTCAATATGCGAAATGACAAATGCCTAATGCCAAAT
G
CCAATCCAAATAACCCAATAACCGATTCAAGTGCGAGAACAGAAATGCC
A
CACCTCTAACCCAGTGCACTTGCTCTGTCTGCTCCGCTGGGCAATCAAAC
TAATCGCCAATTCATATTATTATTAAGGCTCCACGGCTCTGGGCTTCTAC
ACGCCCATGAAGGGCACGGCGATGGACAACCTATTCCAGCTGGGTGTCA
C
CCGATACGCCCTGCCCGAGAGCAGCAGCAGTGGGAGCAGCAATGGCAG
CC
ACAGTCCAGGCAGCAACGGGAGCAGTCCAGCCGGAGCTGCGGGCAGCC
GG
TTGATGTTCAACGGGAATGGCAGCATTATGGGCATCGGCGAGGGACTGA
T
CAAGGAGGGCGACTTGGCGGCAACGGAAGCAGGACCTGGAACTGCAGA
TG
GAGCAGGTGCCTCCAAGAAGGGTTCAGCTGTGGACGAGGATGATTACCA
T
CTGACGGCGACGCCGGGCGCCGAAGTTGTGTACAGCGAGGGTACACAG
AA
AACGGATTTGCTATATTAGGTCGTCCTGCCAGCCAAAAAACCGGAGCGT
C
TAGCTCTTTTTCTACCGGTTTCCACCAAACTCCAAACCTTCCGAGCATAA
CAACCTACCACATCCTGATCGTTCCCCTAATTGAAAAGCGTGCACTTAGG
TGAAATATCAACTTCGGTTAGACGCGAAAACAGTAACGAAGGAAAGAA
AA
ATAAAAACAACAAGGCAACGTAAACCAAGTATGGCAAGAAATCCATAA
AG
ATACGTATATAAATAGATATTATTTGTAAGTTTGTAAGCCTAGAGATCCG
ATGTGTATGTGTACAACAGCAAGCGTGTGTGTCTGTCTTCTTTATAAATA
TATATATATGGTTTTTTTTTTTTGATAAATTAATAATTATATTATTGTAA
TGTATCTACATACGGCACTGAATGAACAACTTTGCTGCTGCAATTGTATT
TGTATTTGTATTGTGTATTCCATTTACGGCATTTTGATAGTAAATATACA
ACAACAACAAATCAACGTATTTCCGACTGCATCCCGAAGGTTACTGAAA
C
CTTAATCCACGAAGTACGCGACGAGCGGTTAGTCCCGCCCGAGTATTAA
C
TTAATGGATTCTAACGATCCGATCTTGTGACCCATCATCATCCCTTTTCG
CGACCCTTCCAAAACGAAAATGAAGAACATTCTAAGCTCCGCTTGCCCA
T
TCAGCGGAAGAAAGCAAAGGAAAATGTAACATTTGCCTCATAATTATTA
T
ATACATTTAGCGCTTATTGAATATTTTTTACAATTGTATTCCGT
>bif|FBgn0014133
MESQKRPSLDLHTDVPAGLAAGGSGLGAAAEMSPTSGFLPDMPQWKKDLI
QRRKTNVARTQAASITSPTDGSCGALAEANAAPGAIADFTEPATISSTSQ
KRNMIGSEEKSEKSSISNTNSDSTGGHHSVVAVSLSPDAAATTNVTVTPI
PKQRSSLLNTRSQEREMVRYILSESGERDGELESGEQPAGVVSNSRCGEV
ETGTIGSPSSSANQNPNPNHLKTKCKPGQSVAEGKPSAKETIVDNSKSCS
KTKSISDKLQSNKFIIQQQQQQQQQQQQQQQLSPTKVTVKPTMVAMQEMK
KTTKQNGQHRHLAGKIGSVAGGDVDPQHPPTNPIPDSLDTGEDLSYGPGI
VSKLRCRYLSLALRESRQQSSKQRLQRSTSLNTLLDRDDDEVEVEEPEMT
NSQVRAKSTPPPILGAKPTPKPSSQHQRPVSLGANGAGSAVNPPSNSDQA
QTGAVANGGAGSGQRSRHFKRGNEVMKRARSVEALLCEKSPWNSQRISTA
GAAAAAAPSPPAPKATAAAPSPVTSPTCVTIEDKIHNARERLHSGTDTAP
PKRLTSIIDTERPPPDLVKQTLKMFEASANRRPRAAHRSNGVGGVASKV
ANYKSIIKDQKQPSSAAATPPPTGMGFASSTPLRHVHPDIIPRQVDSPVS
ALSVMMRRMELQEPETPERETRDAEATPQSEALSETERNDRDEGDGEVDD
DNHNNNDDDHDDGDDGSDNNEQRDKMGAAAAGDKPKPPAESAAGGAQR
SF
AASTENAHVASGSSSSTSASVRKLSNNNDSSSGPAVTKQIGVIRPLFNSQ
GAGSTPLTSREIEKNRINEMKKSTATDAGGSVSGSGTVAGAGSGTSPTTS
LDSVINTKEAASSETDASASPLWTLRKLRNQSQTAGGGSGPSSSLHSTEN
TSMVFNFSKSTKEVPDYIESDVVIYRRKRELPKPNEPGFVLLGDLSVETS
TDTDYDDYSMCPPSPCDVEFENANIVIDGKSSIRQKPKESSFRVQFNDTL
TSTFEYPSEASMTIEDPPYADPFGHVSKHHQMLLAEQMHLLQHQEQLELE
QMHQLGLAPEQHHHVTVDEIIELPTSTAGHGHGIGLGHRSGAAGGGGTML
GNLPLDII
wap1^{Scim}
>>wap1|FBgn0004655|cDNA sequence
AATCGTTAGCCCAGCTCTAAAATAGTGTTTCTCTTCTCTCGTGTAGAAAA
ACAGAGAAATTAAACTTTTTCGCGCATTTCGCCATTGCAAAAATTGAAAT
TCGCGATCGCGTTCGTTTACCCTGCAAATTGCACAACTACGCGCTCTCGA
TTGGCGCCGATTTAGCGGAGAATCGCGAAATCAAAGAAATATTCGCAGC
A
AGAAGAAGAACGGAACGGCCAGTATAATCGTATTGTTGTTTGTGTTGGT
G
TTAGTTGTGTGTGTGTTTGTGGGTGTTGTTGTTGCTGCTGCTACTGCTTC
TGGGATGATGCTGTAAAGTAAAAGTGGTGGCAAAAGCACTAAGCCCGTG
G
TGCGACGCAAAAAACACGCTGCAGTTAGCGGCCAGGCGGAAAATGATA
AG
AGTGATGGTGGCTTGAGCCCCGAGTAATCGCTAAAATATCGAGCACACA
G
TTCGTGCAAATCAAATTGCGCCAATAAGCAAAAGCAAACGCAAACATCG
T
TTGTTTTATTGCATTCCACGCACACACACACCTATATATATGCACACGCA
CGCAGTCGCATACATATGCGCTGCAGCAGCAACAGAGATTTTTTTATTTG
ACCACACTCACTCACACACGCAACCACATGCATCCACGCAGCAAACGGA
T
AACAACAAAAACAAAGAGAGCAGCCAAATGTTTCGCCTGAGTGACCAC
AT
CACCAGGATTAGAGTCAGCAACACGGAGTTAGAGGATACCAGAAGCA
GC
AAAGGAACCACCGCTAGCGAAGATGTCGCGCTGGGGCAAGAACATCGT
GG
TGCCGCTGGACTCACTCTGCAAGGAGAAGGAGAACACCAACCGGCCCAC
T
GTCGCCCGTTCCGTGGGCACCGTTGGCAAGTGGGGCAAGATGGGCTTCA
C
CTCCACGCGCACCTACACCCTGCCCGCCATCCATCCTATGGCTGCGGCA
G
CGGCGGCTGCTGCAGCAGCCGCCAGTCCCTCCCAGAGTCCCGCCTCCAC
G
CAGGATCACGATCCCAACGACCTGTCCGTTTCGGTTCCGGAGCCGCCGA
A
GCCGAAAAAGTTCTTCAAATCGAGGAATACAGCTCCGCCGGAGGTCATA
G
CTCAGATCATTCAGCAGCTACCGCACTGTGGAGCCGGCGCATCACCCAT
G
CGAGACCATTTCTCGTCGGCGGGTGCGGGTGCTGGTGGTCTCACGCCTA
C
TTCCGGTGCCCAGGAGGCGGGCGGAGTGAAGCTGAAGCCGGGCAAGGG
CG
CCAGTTCCGCAGAGCGGAAGCGCAAATCGCCGAAAAAGAAGGCAGCAA
CA
ACGTCAGCCTCCACGCCCTCGACGCCTGGTGCGTTCTACGGCGCCTCCG
A
TCGAGATGGCGATGGGCTAAGCGATCCCGCCTCAGAGCAGCCGGAGCA
AC
CGTCCAGTGCCTCGGGCAAGCAGAAGCAGAAGAAGCCGAAGGAGGAGA
AG
AAGCTGAAGCCAGAGGCGCCGCCTTCGCGGGTACTGGGACGCGCCCGCA
A
GGCTGTCAACTACCGCGAAGTGGACGAGGACGAGCGCTATCCCACGCCC
A
CCAAGGATCTGATCATTCCCAAAGCGGGGCGCCAACCGGCTGAAGTGGC
G
GCTACGGCAACACTTGCCGCCGCTTCGTCGGAAGCCTTCATCAGTTCCAC
GTTTGGCAGCCCTGGATCGGAGCCGTCGTTACCCCCGCCTACGTCAGCG
C
CAAGTGCATCTGCGTCCACCTCGTCCCAACTGCCCTCCGCATCAGGCAG
C
GCGTCAAATCCTCCCAGCGCCTCCCGCACGCCAGAACATCCTCCTATCGT
GCTACGCATCTCCAAGGGCACTTCGCGGTTGGTCAGCACGGATAGCGAG
G
AGCCGCCGAGCAGCTCGCCCGCTCACCAGAACCAACTGAATCAACTTTC
G
GTCACGGAGGAGGAGCCAGCGGAGCGGTCCGGAGACGAAACAGTTCCT
GC
AAGTACGCCAAAAATCACAGTGAAGCCACTGAGGCCGCCCACAGCAGC
AG
ATTCCGTCGATGGATCATCTGCGGCAGTTGGAGGAGCATCAGCAGGCGA
T
TCTTTCGAGGAACGCAAGTCCCAGTCACTAGAACCCAACGAGGACGAGG
A
GGAGGAAGAAGAGGAGGAGGACGAGGAGGAGGAACCGCCGGAGATCA
ACT
ACTGCACGGTAAAGATATCCCCGGACAAACCGCCGAAGGAGCGGCTCA
AA
CTGATCATCAAGACGGACGTGATCCGCAACGCCATCGCCAAAGCCGCAG
C
AGCAGCCGAGTCCCGCAGTGAAAAGAAGTCGAGGAGCAAAAAGCACAA
GC
ACAAGCAGCTGCTTGCCGCGGGATCTGGTGCCGCTCCAGCTTCTGGAGC
C
ACCCCCGCCGAGATCAACTCCGAATTCAAGACACCCTCACCTCATTTGG
C
TCTCAGCGAGGCCAATAGTCAACAAGCACAGCATACACCATCTCATCTA
C
ATCAACTGCACCAGCTGCATCCGCAGCGAGGCTCCGCGGTCATATCACC
A
ACCACTCGATCCGATCACGACTTCGACTCGCAGTCCTCGGTGCTGGGCA
G
CATCTCCTCGAAGGGCAACAGCACGCCGCAACTGTTAGCGCAGGCTGTG
C
AGGAGGATAGTTGTGTGATTCGCAGCAGGGGATCTAGTGTGATCACCAG
T
GATCTAGAGACGAGTCAGCACTCCTCGCTGGTGGCTCCCCCCTCGGACA
T
TGAGTCACGACTGGAGTCCATGATGATGACCATCGACGGAGCGGGAACG
G
GAGCAGCATCTGCAGTGCCGGAGACACCACTGCAGGAGGACATACTGG
CT
GTGCTGCGAGGGGAAGTGCCACGGCTAAATGGCAATACGGACCCGGAG
CC
AACCGAGGAGGAGGATCAACAGCAACAGCCGAAGAGGGCCACGCGTGG
CA
GGGGCAGAAAGGCCAATAACAATGTGGATGTAACCCCACCCGCCACGG
AG
ACCAGAACCCGAGGTAGGGCCAAAGGAGCAGATGCGACCACGGCTGCC
AT
ATCGCCACCAACGGGCAAAAGAAACACGCGGGGCACCCGGGGCTCCAG
AA
AGGCCGAGCAGGAAGTCGACATGGAAGTGGACGAAACGGCGATGACGA
CG
GTGCCAGCGAACGAGGAACAGCTGGAACAGGCCACACTTCCACCGAGG
AG
AGGTCGCAATGCTGCTGCCCGAGCCAATAACAATAATTTGGCAAGCGTT
A
ACAATAACATTAATAAAATAGCCGCCAATTTGTCAGCCAAGGCCGAGGC
C
AGCCGACTAGCAGAAGGCGGAGTCGCGGGTGGAGCGGCACGAAGCTAT
GG
TCGGAAACGAAAGAACCAGCAGGTAACGCAGGTGCTACAGCAGGAGCC
AG
TGCCCGAAGAGCAGGAAACTCCTGATGCTGAGGAGGAGCAGCCCACAC
CC
GCCAAGATTCCGCACACAGATCACAGGGAACATTCGCCAGACCATGATC
C
GGATCCTGATCCGGATGAACTGTCGAACAACTCAAACAACTCCTCGTTG
C
AGCACGATGGGTCCTCCTCCTCGCCCCCACCCCGCGATTTCAAGTTTAAG
GATAAGTTTAAGCGAACATTGACACTGGACACACAGGGCGCGGCGAAC
GC
CGGAGCGGGAGGAGCAGCAGCGGCGGCGCCACCTGAGTCCTCTGGCGA
AC
AGCGGGGCGCTGTCAAGCTGGTCATCTCAAAGAAGAAAGGCAGCATCTT
C
AAAAGCCGCGCTCTGGTGCCATCCGATCAAGCGGAACAGGCTACAGTGG
C
CAAGCGACATCTGTACAAGCACAGTTGGGATGCTGCGCTAGAAGCGAAT
G
GCGGTGGAACCAACAGCGATGCCAGCAATGCCTCGGCATCTGGCGTGGG
C
GTCGCTGGGGCGAAGGATCATCTGCATCATTTAGCGGCGGGCAAGTCCG
A
TGGTGATTTCGGTGACAGTCCGTCGTCGAACAACAATGGCTCCTCCAGT
G
CGTGCAGCAGCGCATCCACGTTGCGCGGCGATAGCCCGGCCCTCGGAAA
G
ATCTCGCGACTGGCGGGAAAACAGGGAGTACCTGCCACCTCCACTAGTT
C
CGATGCCTTTGACCTGGATTTGGAACCAATTGCCGGAGAGCTTGACCTA
G
AGCGTAGTGCAGCTGGTGCTTCCGCTGGTGGAACAGGGGCAACGACAGG
C
GGAGTGGAGCGACGGGCGGTGGCGGCCCCGTTCGGGTCGACCGCAAA
AC
TAAGGACTACTATCCAGTGGTGCGTAACGTTAAGACGGCCCATCAAATT
C
AGGAGATCGGCGAGTACCAGGAAATGGACGACGACGTCGAGTACATCC
TG
GACGCACTTCAGCCGCACAATCCCCCGGCAACACGGTGTCTCTCCGCCC
T
TCAGCTAGCCGCCAAGTGTATGATGCCCGCCTTCCGGATGCACGTGCGT
G
CCCATGGGGTGGTCACCAAATTTTTCAAGGCATTATCCGACGCCAACAA
G
GACCTCAGCCTAGGCCTGTGCACCTCGGCCATCATGTACATTCTTTCCCA
GGAGGGCCTCAACATGGACCTGGATCGCGACTCCTTGGAGCTGATGATC
A
ACCTTCTGGAGGCGGACGGCGTGGGTGGCAGCACGGAGACTGGGCACC
CG
GATAGAGCGGGCTACGACCGCAACAAGCAGAAGGTGCGCGAGTTGTGC
GA
GGAGATCAAGGCGCAGGGCAAGGGAACGCATCTCAACGTTGATTCTCTG
A
CTGTGGGCACGCTGGCAATGGAAACGCTGCTATCGCTAACATCCAAGCG
C
GCGGGCGAGTGGTTTAAAGAGGATCTGCGCAAGCTGGGTGGCCTGGAGC
A
CATTATCAAGACCATCTCGGACTTCTGCAGACCGGTGATTGCCTGCGAC
A
CGGAGATTGACTGGCAGCCGACGCTGCTGGATAACATGCAAACGGTGGC
G
CGTTGTCTGCGAGTCCTCGAAAACGTGACGCAGCACAATGAGACGAACC
A
GCGCTACATGCTCACCTCTGGCCAGGGAAAAGCAGTGGAGACGCTTTGC
C
AACTGTACCGTCTTTGCAGCCGACAAATAATGCTGCATCCTTCGGATGGT
GGTGGCAGCAACAAGGAGCATCCGGGTGTGGCTATGCGCGAGCTGCTGG
T
GCCGGTGCTCAAGGTACTGATCAACCTGACGCACACGTTCAACGAGGCG
C
AGCCATCGTTGGGAGCCGAGCTGCTAGGTCAAAGGGGCGATGTGGTGGA
G
ACGAGCTTCCGATTGCTGCTGCTCTCGGCCAACTACATTCCCGACCAATG
TGTCTTTGAGCTAAGCATACTGGTTCTTACACTGCTAATCAATTTGTGCA
TGCATACTGTGCCCAACCGGGCTGCTCTAATGCAAGCTGCCGCTCCGGC
A
GAGTACGTAGCGGATAATCCACCAGCGCAGGGATCTGTGAGTGCACTGC
A
AGCTCTGCTTGAGTACTTCTACAAGTGCGAGGAGCTGGCTAGATTGGTG
G
AAAAGAACACGGACGCCTTCCTCGAGAGCAACGAGAAGGGAAAGAAGA
AA
CAAGAAGAAGTGGAGGAGACAGTCAACAATCTTGTGCAACGAGCCGGC
CA
CCACATGGAGCACACGCTAAAGGGAAGTTATGCGGCCATCCTGGTGGGA
A
ATCTGATAGCGGACAACGAGTTGTACGAGTCGGTGGTGCGCCGCCAGCT
G
CGAGGAAATAGCTTTAAGGAGATTATTGGAGTGCTGGAGAAGTACCACA
C
ATTCATGAACCTTACATCCAGCTTGGAGGCAGCCTTTGTGGCGCATATGA
AGTCCACGAAGCGCATCATCGACAACTTTAAGAAGCGCGACTACATCTA
C
GAGCACTCGGATGAGCACGACAACCCCCTGCCTCTGAATCTGGAAACGA
C
GGCGCAAGTCTTGGCCGTGGGAGCGGACGCGTCGCATGCTGCTACAAGC
T
CGACCACGGTCGGCTCTGGCTCCGCACCCTCATCCACATCGGCCACAGG
A
ACGACGAGGGCGCCGCGGGTCTATAAAACGTACAGCAGCCACAGGTAA
TC
GGACCTGGGATCTGAATCGGAATCGAAGAGCCATCGCAATTGTCGTTAA
C
CACACCGAAAGCCTGCCACCAAAATAAAATTCTGTTGTTTGTGATTATGT
AATTTGTTTATGTGTTGATATAACAATCACTACATGTATGTGTATAGCCT
GTAATGCACCTAGTTTCAGTCAGCTATATATATATAGATATATATATATA
TAGAAGTATATAGCTAAGAGCGATAGGATACAATGCGATCTGTTTTGC
G
TTTGTATTAACCCAAAGTGATAGCGAATTCCTGAGCATGGTCTGCGTTTT
AACTAAAGAAAATGATTAAGATTGACGAAACGAAAGCGACACCCCGAA
CA
ACACAAAGATCCAAATCCCCACTAATATGAGTACGTTATATAGTCATAA
G
CAATATTAGCAGCTAAATGTCGGCTTACCCTCGAAAGCACACACCCATG
T
AAATATTCTTTAATCAGCGATTTTATCGGACGCGTCTTAGGTTTATTTCG
AATGTGTTTTTTTTTTACCTATTCATACTTTATATATTAAACCTTTTTTT
TATTGATTGTAAAACAAGCGCTCTTAGCAAAAACGCTGCAGCAGAAAGA
G
CGAGAGCGATAGACATGTGTAAAGAGAGAGTTAGAGAGGAAAATTCTA
GA
TTAGATGTGGGAAATAAAGTTATTTTATTGCCTAAACGTAAGCTAAAGA
A
ACTCTACTTATAAAACTAACACTGATAAATAAATATATATATGTATATGG
A
<<wap1|FBgn0004655|cDNA sequence
GAATTGGAGTCGAGTCGCTCTCCCGAGTTGTTGGTGTTTTGTTTTTTGTT
CCGCATTTATCTGTCGGTTCTTGCCCATTTCGGTTCACTTGGAGTGCTAA
TTACCGGGAACGCGACATAGTTGTGCTTATTTTCATTTGCCAGATCAGCT
AGCCAAAAGGCACTTCGCGGTTGGTCAGCACGGATAGCGAGGAGCCGC
CG
AGCAGCTCGCCCGCTCACCAGAACCAACTGAATCAACTTTCGGTCACGG
A
GGAGGAGCCAGCGGAGCGGTCCGGAGACGAAACAGTTCCTGCAAGTAC
GC
CAAAAATCACAGTGAAGCCACTGAGGCCGCCCACAGCAGCAGATTCCGT
C
GATGGATCATCTGCGGCAGTTGGAGGAGCATCAGCAGGCGATTCTTTCG
A
GGAACGCAAGTCCCAGTCACTAGAACCCAACGAGGACGAGGAGGAGGA
AG
AAGAGGAGGAGGACGAGGAGGAGGAACCGCCGGAGATCAACTACTGCA
CG
GTAAAGATATCCCCGGACAAACCGCCGAAGGAGCGGCTCAAACTGATC
AT
CAAGACGGACGTGATCCGCAACGCCATCGCCAAAGCCGCAGCAGCAGC
CG
AGTCCCGCAGTGAAAAGAAGTCGAGGAGCAAAAAGCACAAGCACAAGC
AG
CTGCTTGCCGCGGGATCTGGTGCCGCTCCAGCTTCTGGAGCCACCCCCGC
CGAGATCAACTCCGAATTCAAGACACCCTCACCTCATTTGGCTCTCAGCG
AGGCCAATAGTCAACAAGCACAGCATACACCATCTCATCTACATCAACT
G
CACCAGCTGCATCCGCAGCGAGGCTCCGCGGTCATATCACCAACCACTC
G
ATCCGATCACGACTTCGACTCGCAGTCCTCGGTGCTGGGCAGCATCTCCT
CGAAGGGCAACAGCACGCCGCAACTGTTAGCGCAGGCTGTGCAGGAGG
AT
AGTTGTGTGATTCGCAGCAGGGGATCTAGTGTGATCACCAGTGATCTAG
A
GACGAGTCAGCACTCCTCGCTGGTGGCTCCCCCCTCGGACATTGAGTCA
C
GACTGGAGTCCATGATGAATGACCATCGACGGAGCGGGAACGGGAGCAG
CA
TCTGCAGTGCCGGAGACACCACTGCAGGAGGACATACTGGCTGTGCTGC
G
AGGGGAAGTGCCACGGCTAAATGGCAATACGGACCCGGAGCCAACCGA
GG
AGGAGGATCAACAGCAACAGCCGAAGAGGGCCACGCGTGGCAGGGGCA
GA
AAGGCCAATAACAATGTGGATGTAACCCCACCCGCCACGGAGACCAGA
AC
CCGAGGTAGGGCCAAAGGAGCAGATGCGACCACGGCTGCCATATCGCC
AC
CAACGGCAAAAGAAACACGCGGGGCACCCGGGGCTCCAGAAAGGCCG
AG
CAGGAAGTCGACATGGAAGTGGACGAAACGGCGATGACGACGGTGCCA
GC
GAACGAGGAACAGCTGGAACAGGCCACACTTCCACCGAGGAGAGGTCG
CA
ATGCTGCTGCCCGAGCCAATAACAATAATTTGGCAAGCGTTAACAATAA
C
ATTAATAAAATAGCCGCCAATTTGTCAGCCAAGGCCGAGGCCAGCCGAC
T
AGCAGAAGGCGGAGTCGCGGGTGGAGCGGCACGAAGCTATGGTCGGAA
AC
GAAAGAACCAGCAGGTAACGCAGGTGCTACAGCAGGAGCCAGTGCCCG
AA
GAGCAGGAAACTCCTGATGCTGAGGAGGAGCAGCCCACACCCGCCAAG
AT
TCCGCACACAGATCACAGGGAACATTCGCCAGACCATGATCCGGATCCT
G
ATCCGGATGAACTGTCGAACAACTCAAACAACTCCTCGTTGCAGCACGA
T
GGGTCCTCCTCCTCGCCCCCACCCCGCGATTTCAAGTTTAAGGATAAGTT
TAAGCGAACATTGACACTGGACACACAGGGCGCGGCGAACGCCGGAGC
GG
GAGGAGCAGCAGCGGCGGCGCCACCTGAGTCCTCTGGCGAACAGCGGG
GC
GCTGTCAAGCTGGTCATCTCAAAGAAGAAAGGCAGCATCTTCAAAAGCC
G
CGCTCTGGTGCCATCCGATCAAGCGGAACAGGCTACAGTGGCCAAGCGA
C
ATCTGTACAAGCACAGTTGGGATGCTGCGCTAGAAGCGAATGGCGGTGG
A
ACCAACAGCGATGCCAGCAATGCCTCGGCATCTGGCGTGGGCGTCGCTG
G
GGCGAAGGATCATCTGCATCATTTAGCGGCGGGCAAGTCCGATGGTGAT
T
TCGGTGACAGTCCGTCGTCGAACAACAATGGCTCCTCCAGTGCGTGCAG
C
AGCGCATCCACGTTGCGCGGCGATAGCCCGGCCCTCGGAAAGATCTCGC
G
ACTGGCGGGAAAACAGGGAGTACCTGCCACCTCCACTAGTTCCGATGCC
T
TTGACCTGGATTTGGAACCAATTGCCGGAGAGCTTGACCTAGAGCGTAG
T
GCAGCTGGTGCTTCCGCTGGTGGAACAGGGGCAACGACAGGCGGAGGT
GG
AGCGACGGGCGGTGGCGGCCCCGTTCGGGTCGACCGCAAAACTAAGGA
CT
ACTATCCAGTGGTGCGTAACGTTAAGACGGCCCATCAAATTCAGGAGAT
C
GGCGAGTACCAGGAAATGGACGACGACGTCGAGTACATCCTGGACGCA
CT
TCAGCCGCACAATCCCCCGGCAACACGGTGTCTCTCCGCCCTTCAGCTA
G
CCGCCAAGTGTATGATGCCCGCCTTCCGGATGCACGTGCGTGCCCATGG
G
GTGGTCACCAAATTTTTCAAGGCATTATCCGACGCCAACAAGGACCTCA
G
CCTAGGCCTGTGCACCTCGGCCATCATGTACATTCTTTCCCAGGAGGGCC
TCAACATGGACCTGGATCGCGACTCCTTGGAGCTGATGATCAACCTTCTG
GAGGCGGACGGCGTGGGTGGCAGCACGGAGACTGGGCACCCGGATAGA
GC
GGGCTACGACCGCAACAAGCAGAAGGTGCGCGAGTTGTGCGAGGAGAT
CA
AGGCGCAGGGCAAGGGAACGCATCTCAACGTTGATTCTCTGACTGTGGG
C
ACGCTGGCAATGGAAACGCTGCTATCGCTAACATCCAAGCGCGCGGGCG
A
GTGGTTTAAAGAGGATCTGCGCAAGCTGGGTGGCCTGGAGCACATTATC
A
AGACCATCTCGGACTTCTGCAGACCGGTGATTGCCTGCGACACGGAGAT
T
GACTGGCAGCCGACGCTGCTGGATAACATGCAAACGGTGGCGCGTTGTC
T
GCGAGTCCTCGAAAACGTGACGCAGCACAATGAGACGAACCAGCGCTA
CA
TGCTCACCTCTGGCCAGGGAAAAGCAGTGGAGACGCTTTGCCAACTGTA
C
CGTCTTTGCAGCCGACAAATAATGCTGCATCCTTCGGATGGTGGTGGCA
G
CAACAAGGAGCATCCGGGTGTGGCTATGCGCGAGCTGCTGGTGCCGGTG
C
TCAAGGTACTGATCAACCTGACGCACACGTTCAACGAGGCGCAGCCATC
G
TTGGAGCCGAGCTGCTAGGTCAAAGGGGCGATGTGGTGGAGACGAGCT
T
CCGATTGCTGCTGCTCTCGGCCAACTACATTCCCGACCAATGTGTCTTTG
AGCTAAGCATACTGGTTCTTACACTGCTAATCAATTTGTGCATGCATACT
GTGCCCAACCGGGCTGCTCTAATGCAAGCTGCCGCTCCGGCAGAGTACG
GTGCCCAACCGGGCTGCTCTAATGCAAGCTGCCGCTCCGGCAGAGTACG
T
AGCGGATAATCCACCAGCGCAGGGATCTGTGAGTGCACTGCAAGCTCTG
C
TTGAGTACTTCTACAAGTGCGAGGAGCTGGCTAGATTGGTGGAAAAGAA
C
ACGGACGCCTTCCTCGAGAGCAACGAGAAGGGAAAGAAGAAACAAGAA
GA
AGTGGAGGAGACAGTCAACAATCTTGTGCAACGAGCCGGCCACCACATG
G
AGCACACGCTAAAGGGAAGTTATGCGGCCATCCTGGTGGGAAATCTGAT
A
GCGGACAACGAGTTGTACGAGTCGGTGGTGCGCCGCCAGCTGCGAGGA
AA
TAGCTTTAAGGAGATTATTGGAGTGCTGGAGAAGTACCACACATTCATG
A
ACCTTACATCCAGCTTGGAGGCAGCCTTTGTGGCGCATATGAAGTCCAC
G
AAGCGCATCATCGACAACTTTAAGAAGCGCGACTACATCTACGAGCACT
C
GGATGAGCACGACAACCCCCTGCCTCTGAATCTGGAAACGACGGCGCAA
G
TCTTGGCCGTGGGAGCGGACGCGTCGCATGCTGCTACAAGCTCGACCAC
G
GTCGGCTCTGGCTCCGCACCCTCATCCACATCGGCCACAGGAACGACGA
G
GGCGCCGCGGGTCTATAAAACGTACAGCAGCCACAGGTAATCGGACCTG
G
GATCTGAATCGGAATCGAAGAGCCATCGCAATTGTCGTTAACCACACCG
A
AAGCCTGCCACCAAAATAAAATTCTGTTGTTTGTGATTATGTAATTTGTT
TATGTGTTGATATAACAATCACTACATGTATGTGTATAGCCTGTAATGCA
CCTAGTTTCAGTCAGCTATATATATATAGATATATATATATATAGAAGTA
TATAGCTAAGAGCGATAGGATACAATGCGATCTGTTTTGCGTTTGTATT
AACCCAAAGTGATAGCGAATTCCTGAGCATGGTCTGCGTTTTAACTAAA
G
AAAATGATTAAGATTGACGAAACGAAAGCGACACCCCGAACAACACAA
AG
ATCCAAATCCCCACTAATATGAGTACGTTATATAGTCATAAGCAATATTA
GCAGCTAAATGTCGGCTTACCCTCGAAAGCACACACCCATGTAAATATT
C
TTTAATCAGCGATTTTATCGGACGCGTCTTAGGTTTATTTCGAATGTGTT
TTTTTTTTACCTATTCATACTTTATATATTAAACCTTTTTTTTATTGATT
GTAAAACAAGCGCTCTTAGCAAAAACGCTGCAGCAGAAAGAGCGAGAG
CG
ATAGACATGTGTAAAGAGAGAGTTAGAGAGGAAAATTCTAGATTAGATG
T
GGGAAATAAAGTTATTTTATTGCCTAAACGTAAGCTAAAGAAACTCTAC
T
TATAAAACTAACACTGATAAATAAATATATATATGTATATGGA
>wap1|FBgn0004655
MSRWGKNIVVLDSLCKEKENTNRPTVARSVGTVGKWGKMGFTSTRTYTL
PAIHPMAAAAAAAAAAASPSQSPASTQDHDPNDLSVSVPEPPKPKKFFKS
RNTAPPEVIAQIIQQLPHCGAGASPMRDHFSSAGAGAGGLTPTSGAQEAG
GVKLKPGKGASSAERKRKSPKKKAATTSASTPSTPGAFYGASDRDGDGLS
DPASEQPEQPSSASGKQKQKKPKEEKKLKPEAPPSRVLGRARKAVNYREV
DEDERYPTPTKDLIIPKAGRQPAEVAATATLAAASSEAFISSTFGSPGSE
PSLPPPTSAPSASASTSSQLPSASGSASNPPSASRTPEHPPIVLRISKGT
SRLVSTDSEEPPSSSPAHQNQLNQLSVTEEEPAERSGDETVPASTPKITV
KPRPPTAADSVDGSSAAVGGASAGDSFEERKSQSLEPNEDEEEEEEEED
EEEEPPEINYCTVKISPDKPPKERLKLIIKTDVIRNAIAKAAAAAESRSE
KKSRSKKHKHKQLLAAGSGAAPASGATPAEINSEFKTPSPHLALSEANSQ
QAQHTPSHLHQLHQLHPQRGSAVISPTTRSDHDFDSQSSVLGSISSKGNS
TPQLLAQAVQEDSCVIRSRGSSVITSDLETSQHSSLVAPPSDIESRLESM
MMTIDGAGTGAASAVPETPLQEDILAVLRGEVPRLNGNTDPEPTEEEDQQ
QQPKRATRGRGRKANNNVDVTPPATETRTRGRAKGADATTAAISPPTGKR
NTRGTRGSRKAEQEVDMEVDETAMTTVPANEEQLEQATLPPRRGRNAAAR
ANNNNLASVNNNINKIAANLSAKAEASRLAEGGVAGGAARSYGRKRKNQQ
VTQVLQQEPVPEEQETPDAEEEQPTPAKIPHTDHREHSPDHDPDPDPDEL
SNNSNNSSLQHDGSSSSPPPRDFKFKDKFKRTLTLDTQGAANAGAGGAAA
AAPPESSGEQRGAVKLVISKKKGSIFKSRALVPSDQAEQATVAKRHLYKH
SWDAALEANGGGTNSDASNASASGVGVAGAKDHLHHLAAGKSDGDFGDS
P
SSNNNGSSSACSSASTLRGDSPALGKISRLAGKQGVPATSTSSDAFDLDL
EPIAGELDLERSAAGASAGGTGATTGGGGATGGGGPVRVDRKTKDYYPVV
RNVKTAHQIQEIGEYQEMDDDVEYILDALQPHNPPATRCLSALQLAAKCM
MPAFRMHVRAHGVVTKFFKALSDANKDLSLGLCTSAIMYILSQEGLNMDL
DRDSLELMINLLEADGVGGSTETGHPDRAGYDRNKQKVRELCEEIKAQGK
GTHLNVDSLTVGTLAMETLLSLTSKRAGEWFKEDLRKLGGLEHIIKTISD
FCRPVIACDTEIDWQPTLLDNMQTVARCLRVLENVTQHNETNQRYMLTSG
QGKAVETLCQLYRLCSRQIMLHPSDGGGSNKEHPGVAMRELLVPVLKVLI
NLTHTFNEAQPSLGAELLGQRGDVVETSFRLLLLSANYIPDQCVFELSIL
VLTLLINLCMHTVPNRALLMQAAAPEYVADNPPAQGSVSALQALLEYFY
KCEELARLVEKNTDAFLESNEKGKKKQEEVEETVNNLVQRAGHHMEHTLK
GSYAAILVGNLIADNELYESVVRRQLRGNSFKEIIGVLEKYHTFMNLTSS
LEAAFVAHMKSTKRIIDNFKKRDYIYEHSDEHDNPLPLNLETTAQVLAVG
ADASHAATSSTTVGSGSAPSSTSATGTTRAPRVYKTYSSHR
>wap1|FBgn0004655
MTIDGAGTGAASAVPETPLQEDILAVLRGEVPRLNGNTDPEPTEEEDQQQ
QPKRATRGRGRKANNNVDVTPPATETRTRGRAKGADATTAAISPPTGKRN
TRGTRGSRKAEQEVDMEVDETAMTTVPANEEQLEQATLPPRRGRNAAARA
NNNNLASVNNNINKIAANLSAKAEASRLAEGGVAGGAARSYGRKRKNQQV
TQVLQQEPVPEEQETPDAEEEQPTPAKIPHTDHREHSPDHDPDPDPDELS
NNSNNSSLQHDGSSSSPDDRDFKFKDKFKRTLTLDTQGAANAGAGGAAAA
APPESSGEQRGAVKLVISKKKGSIFKSRALVPSDQAEQATVAKRHLYKHS
WDAALEANGGGTNSDASNASASGVGVAGAKDHLHHLAAGKSDGDFGDSP
S
SNNNGSSSACSSASTLRGDSPALGKISRLAGKQGVPATSTSSDAFDLDLE
PIAGELDLERSAAGASAGGTGATTGGGGATGGGGPVRVDRKTKDYYPVVR
NVKTAHQIQEIGEYQEMDDDVEYILDALQPHNPPATRCLSALQLAAKCMM
PAFRMHVRAHGVVTKFFKALSDANKDLSLGLCTSAIMYILSQEGLNMDLD
RDSLELMINLLEADGVGGSTETGHPDRAGYDRNKQKVRELCEEIKAQGKG
THLNVDSLTVGTLAMETLLSLTSKRAGEWFKEDLRKLGGLEHIIKTISDF
CRPVIACDTEIDWQPTLLDNMQTVARCLRVLENVTQHNETNQRYMLTSGQ
GKAVETLCQLYRLCSRQIMLHPSDGGGSNKEHPGVAMRELLVPVLKVIIN
LTHTFNEAQPSLGAELLGQRGDVVETSFRLLLLSANYIPDQCVFELSILV
LTLLINLCMHTVPNRAALMQAAAPAEYVADNPPAQGSVSALQALLEYFYK
CEELARLVEKNTDAFLESNEKGKKKQEEVEETVNNLVQRAGHHMEHTLKG
SYAAILVGNLIADNELYESVVRRQLRGNSFKEIIGVLEKYHTFMNLTSSL
EAAFVAHMKSTKRIIDNFKKRDYIYEHSDEHDNPLPLNLETTAQVLAVGA
DASHAATSSTTVGSGSAPSSTSATGTTRAPRVYKTYSSHR
grp^{Scim}
>>grp⊕FBgn0011598|cDNA sequence
TATATTTTAGCAGCGTTTGCGGAATTTTTTGCATTTCAGTTACTCCAAGT
GTGAATAAGAGCACGGTCGCTGTTATAGTGTCTTGCAAAGCAGTGAAT
A
AAAAAGTTTAATAATCCAAATCGAGAATCCCAAATTTGTGTAGACGTAG
C
AACAACAGTAAAACGCGCTGGCCGGAAAAGACGCTGCTGGTAGTGATTC
C
CAATCAGCTTTGTTTACAAGGTCCACTCCAATTCCTACGCACTCGAGTTG
TGGCGAGAGTTTTTTATGCGACATCAACTGAAGCTGGAGCTGCCGAAAG
A
TATGCACGAGGTGGCGAAAGCTGAGCTAGAATCGGGCGGCAGATGACA
AG
GACAACGCCACGCACATGGCGGCAAGGCTACAACAAGGATACAGGATA
CG
GCCAACCGGATATTAAACCATCAACACTAGCCAGCACAGCAAAGCAAA
AT
TAAGGAACAACTGCAATCCCGGTACACCAGTACACCATGGCTGCAACGC
T
GACGGAAGCGGGAACAGGTCCTGCGGCCACCAGGGAGTTCGTCGAGGG
AT
GGACTTTGGCCCAAACTCTGGGCGAAGGTGCCTACGGCGAGGTAAAGCT
A
CTAATCAACCGGCAGACTGGCGAGGCTGTGGCCATGAAAATGGTGGATC
T
AAAAAAACATCCGGATGCAGCGAACTCGGTGCGAAAGGAGGTATGCAT
AC
AGAAGATGCTCCAGGATAAGCATATCCTCCGATTTTTCGGCAAACGTTC
G
CAAGGCAGTGTGGAGTACATATTCCTGGAATACGCCGCCGGCGGAGAGC
T
ATTCGATCGAATAGGTGAGGAACCAGACGTGGGAATGCCGCAGCATGA
GG
CTCAAAGGTATTTTACACAGCTCCTGTCCGGACTCAATTACCTGCATCAG
CGTGGGATCGCTCATCGGGATCTGAAGCCGGAAAATCTGCTGCTTGACG
A
GCATGACAACGTGAAAATATCGGACTTTGGCATGGCTACTATGTTTAGG
T
GCAAGGGCAAGGAGCGACTGCTGGACAAACGCTGCGGCACCTTGCCGT
AT
GTGGCGCCCGAGGTGCTACAGAAGGCATATCACGCCCAGCCGGCGGATC
T
CTGGTCGTGTGGCGTTATATTGGTGACAATGCTGGCGGGTGAGCTGCCCT
GGGATCAGCCGTCCACCAATTGCACGGAGTTCACCAACTGGAGGGATAA
C
GATCACTGGCAACTGCAGACTCCTTGGAGCAAACTGGACACCTTGGCTA
T
TTCGCTGCTCGCAAGCTGCTGGCCACCAGTCCTGGCACGCGTTTGACCC
TGGAGAAAACCCTGGATCACAAATGGTGCAACATGCAGTTTGCAGACAA
T
GAACGTTCCTATGACCTGGTGGACTCGGCGGCTGCCCTGGAGATATGCT
C
GCCAAAGGCTAAGAGGCAGCGTCTGCAGTCTAGTGCCCACTTGAGCAAT
G
GCCTGGATGACTCCATCTCCCGGAACTACTGCTCTAACCCATGCCCACA
ATGCGCAGCGACGATGACTTCAATGTCAGACTGGGCAGTGGCCGATCCA
A
GGAGGATGGAGGCGACCGCCAGACGTTGGCCCAGGAGGCTCGGCTCAG
TT
ACTCCTTCTCGCAACCAGCTTTGCTTGATGATCTCCTACTGGCTACCCAG
ATGAACCAAACGCAGAACGCTTCCCAGAACTATTTCCAGCGTTTGGTGA
G
GAGAATGACCCGATTCTTTGTGACCACACGATGGGATGACACTATCAAG
C
GATTGGTGGGAACCATCGAAAGACTGGGTGGTTATACGTGCAAATTTGG
T
GACGACGGAGTGGTCACCGTATCCACAGTCGATCGGAATAAGCTGCGAT
T
GGTTTTCAAGGCACACATTATAGAGATGGATGGCAAGATTCTTGTTGACT
GCCGGCTGTCAAAGGGTTGCGGCTTGGAGTTTAAACGACGATTTATCAA
G
ATCAAAAACGCCCTGGAGGATATCGTGCTTAAAGGACCCACCACCTGGC
C
GATTGCGATTGCTACAAATTCGGTGCCTTAGCTTTTAGTTTCATTCGAAC
TTAAAATCCTGTCCTGTCTTGTATTCGGTTATATTTACATTTGTCTAGCC
TGTAAGAGCAACTCATGCATCACCTTCGATCAGAATCATCTAAAATTCTC
AATGTGCTAACTTATTTTTAATTCATTGCATTGTTTACGAGTACGTTGTG
TATTGCTAAGCGGGCTCTCATTCGATTTTAATTTTGTTGAATTTTAAAGC
AAAAGTCGAGTATTGAAAACTAGTTTAAATGTTATCGAACAATAAATCT
T
ATGCGATTTTGAGTAGAAAA
>>grp|FBgn0011598|cDNA sequence
GTCCCACTGTGCACTGCTGAACTTGAGCGAGAGAGCAAGTTGAACTTGC
C
AAATGCTGTGCGGAAGAGGAAGAGCGAGAGGATTTCTCCAACCCCTTCC
C
GCCTATCGTTTTTGGCGCGCGCAAGCGTAAGCTCTCCCTGCTCTCGCGGC
CTCTCCGACGCTCTCTGGAAGTTTCGAGTTTCGGGCGAGGCTTTCTCGGT
TCGGCGAACCTAGGCGGCAGTTTGATTTCAACTCTCAGACAGGACGAAG
C
GCCTGCCACAGGATATGGCTGGGAAACTATAGTGGAAACCTACGCCGCT
A
TGTAATAGTAAATTAATAGTAGTTCTCTACTACTGCAGTAGTAGGCGGCG
CTTTTCAATCGTATTGAAAGGAATACAATGACGGGGGCAAGAGAGAAC
G
AACGGAGAAAGAGTGCACGGACCACGAGGCTGTTTCATTAAAATTGGA
T
ACAGACAAAACGTGGCTCGCAGGATACCGGATACGTCTGTGTGCGTGTG
T
GTGCCGCATCCATTCAGGAGGCTAAGAAAAAGGACGGCACACAGTTTTC
A
GTGGTGACTTTCTCGGCAAAATCCTAAAAAAGGACAAAACGGTTCGGTT
C
CTATTTGGTTTCTCGACTTTCGGTCTTCGGGGTAGTTCCTTAGTCTCTCA
GAATAGCAAGATGATAAACCTGAAAAAGAAGAAGAAGCCGTCCAAGAA
GC
AGCTTCGCAAAAATTCCGCGCTTTGGCTCTCAATCGCCAACAATTCGTCG
GAAATCAAGAAAAATATATGCACGAGGTGGCGAAAGCTGAGCTAGAAT
CG
GGCGGCAGATGACAAGGACAACGCCACGCACATGGCGGCAAGGCTACA
AC
AAGGATACAGGATACGGCCAACCGGATATTAAACCATCAACACTAGCCA
G
CACAGCAAAGCAAAATTAAGGAACAACTGCAATCCCGGTACACCAGT
CA
CCATGGCTGCAACGCTGACGGAAGCGGGAACAGGTCCTGCGGCCACCA
GG
GAGTTCGTCGAGGGATGGACTTTGGCCCAAACTCTGGGCGAAGGTGCCT
A
CGGCGAGGTAAAGCTACTAATCAACCGGCAGACTGGCGAGGCTGTGGCC
A
TGAAAATGGTGGATCTAAAAAAACATCCGGATGCAGCGAACTCGGTGCG
AAGGAGGTATGCATACAGAAGATGCTCCAGGATAAGCATATCCTCCGAT
T
TTTCGGCAAACGTTCGCAAGGCAGTGTGGAGTACATATTCCTGGAATAC
G
CCGCCGGCGGAGAGCTATTCGATCGAATAGGTGAAGAACCAGACGTGG
GA
ATGCCGCAGCATGAGGCTCAAAGGTATTTTACACAGCTCCTGTCCGGAC
T
CAATTACCTGCATCAGCGTGGGATCGCTCATCGGGATCTGAAGCCGGAA
A
ATCTGCTGCTTGACGAGCATGACAACGTGAAAATATCGGACTTTGGCAT
G
GCTACTATGTTTAGGTGCAAGGGCAAGGAGCGACTGCTGGACAAACGCT
G
CGGCACCTTGCCGTATGTGGCGCCCGAGGTGCTACAGAAGGCATATCAC
G
CCCAGCCGGCGGATCTCTGGTCGTGTGGCGTTATATTGGTGACAATGCTG
GCGGGTGAGCTGCCCTGGGATCAGCCGTCCACCATTGCACGGAGTTCA
C
CAACTGGAGGGATAACGATCACTGGCAACTGCAGACTCCTTGGAGCAAA
C
TGGACACCTTGGCTATTTCGCTGCTTCGCAAGCTGCTGGCCACCAGTCCT
GGCACGCGTTTGACCCTGGAGAAAACCCTGGATCACAAATGGTGCAACA
T
GCAGTTTGCAGACAATGAACGTTCCTATGACCTGGTGGACTCGGCGGCT
G
CCCTGGAGATATGCTCGCCAAAGGCTAAGAGGCAGCGTCTGCAGTCTAG
T
GCCCACTTGAGCAATGGCCTGGATGACTCCATCTCCCGGAACTACTGCTC
TCAACCCATGCCCACAATGCGCAGCGACGATGACTTCAATGTCAGACTG
G
GCAGTGGCCGATCCAAGGAGGATGGAGGCGACCGCCGACGTTGGCCC
AG
GAGGCTCGGCTCAGTTACTCCTTCTCGCAACCAGCTTTGCTTGATGATCT
CCTACTGGCTACCCAGATGAACCAAACGCAGAACGCTTCCCAGAACTAT
T
TCCAGCGTTTGGTGAGGAGAATGACCCGATTCTTTGTGACCACACGATG
G
GATGACACTATCAAGCGATTGGTGGGAACCATCGAAAGACTGGGTGGTT
A
TACGTGCAAATTTGGTGACGACGGAGTGGTCACCGTATCCACAGTCGAT
C
GGAATAAGCTGCGATTGGTTTTCAAGGCACACATTATAGAGATGGATGG
C
AAGATTCTTGTTGACTGCCGGCTGTCAAAGGGTTGCGGCTTGGAGTTTAA
ACGACGATTTATCAAGATCAAAAACGCCCTGGAGGATATCGTGCTTAAA
G
GACCCACCACCTGGCCGATTGCGATTGCTACAAATTCGGTGCCTTAGCTT
TTAGTTTCATTCGAACTTAAAATCCTGTCTTGTCTTGTATTCGGTTATAT
TTACATTTGTCTAGCCTGTAAGAGCAACTCATGCATCACCTTCGATCAGA
ATCATCTAAAATTCTCAATGTGCTAACTTATTTTTAATTCATTGCATTGT
TTACGAGTACGTTGTGTATTGCTAAGCGGGCTCTCATTCGATTTTAATTT
TGTTGAATTTTAAAGCAAAAGTCGAGTATTGAAAACTAGTTTAAATGTTA
TCGAACAATAAATCTTATGCGATTTTGAGTAGAAAA
>grp|FBgn0011598
MAATLTEAGTGPAATREFVEGWTLAQTLGEGAYGEVKLLINRQTGEAVAM
KMVDLKKHPDAANSVRKEVCIQKMLQDKHILRFFGKRSQGSVEYIFLEYA
AGGELFDRIGEEPDVGMPQHEAQRYFTQLLSGLNYLHQRGIAHRDLKPEN
LLLDEHDNVKISDFGMATMFRCKGKERLLDKRCGTLPYVAPELQKAYHA
QPADLWSCGVILVTMLAGELPWDQPSTNCTEFTNWRDNDHWQLQTPWSK
L
DTLAISLLRKLLATSPGTRLTLEKTLDHKWCNMQFADNERSYDLVDSAAA
LEICSPKAKRQRLQSSAHLSNGLDDSISRNYCSQPMPTMRSDDDFNVRLG
SGRSKEDGGDRQTLAQEARLSYSFSQPALLDDLLLATQMNQTQNASQNYF
QRLVRRMTRFFVTTRWDDTIKRLVGTIERLGGYTCKFGDDGVVTVSTVDR
NKLRLVFKAHIIEMDGKILVDCRLSKGCGLEFKRRFIKIKNALEDIVLKG
PTTWPIAITNSVP
>grp|FBgn|0011598
MAATLTEAGTGPAATREFVEGWTLAQTLGEGAYGEVKLLINRQTGEAVAM
KMVDLKKHPDAANSVRKEVCIQKMLQDKHILRFFGKRSQGSVEYIFLEYA
AGGELFDRIGEEPDVGMPQHEAQRYFTQLLSGLNYLHQRGIAHRDLKPEN
LLLDEHDVKISDFGMATMFRCKGKERLLDKRCGTLPYVAPEVLQKAYHA
QPADLWSCGVILVTMLAGELPWDQPSTNCTEFTNWRDNDHWQLQTPWSK
L
DTLAISLLRKLLATSPGTRLTLEKTLDHKWCNMQFADNERSYDLVDSAAA
LEICSPKAKRQRLQSSAHLSNGLDDSISRNYCSQPMPTMRSDDDFNVRLG
SGRSKEDGGDRQTLAQEARLSYSFSQPALLDDLLLATQMNQTQNASQNYF
QRLVRRMTRFFVTTRWDDTIKRLVGTIERLGGYTCKFGDDGVVTVSTVDR
NKLRLVFKAHIIEMDGKILVDCRLSKGCGLEFKRRFIKIKNALEDIVLKG
PTTWPIAIATNSVP
Rab5^{Scim}
>>Rab5|FBgn0014010|cDNA sequence
CCGTCGTCGGTCATAAAAACGAAAAGCATGTGAACGATACTTTGTGAAG
A
TTTGAAAACGACTTTAGCTTAGTTAATATATGCAACAATTCCGCATCCAC
ACTCAGCAGCAATCTTAGCAGAAAGACTTACTCAGCAGAAGAGGGAGTG
G
GAAGAGCGCATCCACATTCGCATCCGATCCAACCCGAACCGATCATGGC
A
ACCACTCCACGCAGCGGCGGTGCCAGCGGCACTGGAACGGCGCAGCGG
CC
CAATGGCACCTCGCAGAACAAAAGCTGCCAATTCAAGTTGGTGCTCCTC
G
GCGAGTCCGCTGTGGGCAAGTCCTCACTGGTGCTGCGCTTCGTCAAGGG
A
CAGTTCCACGAGTACCAGGAGAGCACGATAGGTGCGGCCTTTCTGACAC
A
GACTATTTGCATAGAGGACACTGTCGTTAAGTTCGAGATCTGGGACACG
G
CTGGCCAGGAGCGGTACCACAGCTTAGCTCCCATGTATTATCGAGGAGC
G
CAGGCCGCTATTGTCGTCTATGATATACAGAATCAGGACAGTTTTCAGC
G
TGCGAAGACCTGGGTCAAGGAACTGCATAAACAAGCCTCACCAAACATT
G
TCATTGCGCTGGCCGGCAACAAGGCAGATTTGTCAAACATTCGCGTCGT
A
GAGTTCGATGAAGCGAAGCAATATGCCGAGGAGAACGGGCTGCTGTTCA
T
GGAAACCTCCGCCAAGACGGGCATGAATGTGAACGACATCTTCTTGGCC
A
TTGCCAAGAAACTACCTAAGAACGATGGCGCCAACAATCAGGGAACCA
GC
ATAAGGCCGACTGGAACCGAAACAAATCGACCGACGAACAACTGCTGC
AA
GTGA
>Rab5|FBgn0014010
MATTPRSGGASGTGTAQRPNGTSQNKSCQFKLVLLGESAVGKSSLVLRFV
KGQFHEYQESTIGAAFLTQTICIEDTVVKFEIWDTAGQERYHSLAPMYYR
GAQAAIVVYDIQNQDSFQRAKTWVKELHKQASPNIVIALAGNKADLSNIR
VVEFDEAQYAEENGLLFMETSAKTGMNVNDIFLAIAKKLPKNDGANNQG
TSIRPTGTETNRPTNNCCK
oafScim
>>oaf|FBgn0011818|cDNA sequence
ATGATCTTAAAGGAGGAGCACCCACACCAGAGCATCGAAACTGCCGCA
AA
TGCGGCAAGGCAGGCGCAGGTCCGCTGGCGAATGGCGCATCTTAAGGCA
C
TCAGCCGCACTCGAACACCAGCGCACGGCAATTGCTGCGGTCGCGTCGT
C
AGTAAAAATCACTTTTTCAAGCACAGTCGCGCGTTTCTGTGGTTCCTGCT
GTGCAACTTAGTGATGAACGCGGACGCATTCGCCCACTCCCAGCTGCTC
A
TTAACGTCCAAAATCAGGGCGGCGAGGTGATCCAGGAGAGTATTACCTC
C
AACATTGGCGAGGACCTGATAACGCTGGAGTTTCAGAAGACCGACGGAA
C
GCTCATCACCCAGGTCATCGACTTTCGCAATGAGGTTCAAATCCTCAAG
G
CTCTGGTTCTCGGCGAGGAGGAGCGTGGCCAGAGCCAGTACCAGGTCAT
G
TGCTTCGCAACCAAGTTCAACAAGGGCGACTTCATCTCCTCGGCGGCAA
T
GGCCAAGCTGCGCCAGAAGAATCCGCACACCATCCGCACTCCCGAGGAG
G
ACAAGGGCCGTGAGACCTTCACCATGAGCAGCTGGGTACAGCTCAACCG
C
TCGCTGCCCATCACCAGACATCTGCAGGGACTCTGCGCCGAGGCCATGG
A
CGCCACCTATGTCCGGGATGTGGACCTTAAAGCTTGGGCGGAGCTACCA
G
GCTCCTCGATTTCCAGCCTGGAGGCCGCCACCGAAAAGTTCCCGGACAC
G
CTCTCGACGCGCTGCAACGAGGTGAGCAGCCTGTGGGCGCCCTGCCTGT
G
CAACCTGGAGACCTGCATCGGCTGGTATCCCTGCGGGCTCAAGTACTGC
A
AGGGCAAGGGAGTCGCCGGAGCGGACTCGTCGGGCGCCCAGCAGCAGG
CA
CAGCCGACGAATTATCGCTGCGGCATCAAGACCTGCCGCAAGTGCACAC
A
GTTCACCTATTATGTGCGGCAGAAACAACAGTGCCTCTGGGATGAATGA
C
GACGCGGCGAGCTGCAGCTGATGCAGATGCGCTGCGCGAGGCGGCGGA
AT
GGTAGCGAGTTTGGGGATGATGCCAGTGCCACCTGCCCGGGTGGCGAA
C
AAGAGCAGCAACCACGACCGCGACAATAACTGGCGGGGGAGCTGGGGG
AA
GTGGGAAGGATACAACGGCAGCGACAACAACGACAACCAACAAATTAC
GC
CAACTGCTTTTGTTGGTCCAGCAGCAGATGCCTTTTGCTCTGTGGAGTTT
TCCGGTCCATCACATTTCCCAGTCCCATCACCAGTCCCAGTCCCAACATA
AGCCCAGCCGGCAGCAGAAGCAGCATCAGCATCATTCTCAGGTTGCCCC
C
ACTTCGCATCACCAGTCATCATCATCAACACCACCAACACCGTCAACAT
C
ATCATCACCGCCATCATCATCATCGTCGTCGTCGTCGTCCGCAATGGCCG
CCATCGTTGCGT
>oaf|FBgn0011818
MILKEEHPHQSIETAANAARQAQVRWRMAHLKALSRTRTPAHGNCCGRVV
SKNHFFKHSRAFLWFLLCNLVMNADAFAHSQLLINVQNQGGEVIQESITS
NIGEDLITLEFQKTDGTLITQVIDFRNEVQILKALVLGEEERGQSQYQVM
CFATKFNKGDFISSAAMAKLRQKNPHTIRTPEEDKGRETFTMSSWVQLNR
SLPITRHLQGLCAEMDATYVRDVDLKAWAELPGSSISSLEAATEKFPDT
LSTRCNEVSSLWAPCLCNLETCIGWYPCGLKYCKGKGVAGADSSGAQQQA
QPTNYRCGIKTCRKCTQFTYYVRQKQQCLWDE
GliScim
>>Gli|FBgn0001987|cDNA sequence
GTTCGAAAGAGTCGGTTGCCTCTGTGTTTTGGCGGTAGTGGTTGTGCGCA
CAGGTGAGAGTTCGGTGCGAAGAGGCGGTTAAAGTTAAAGCTGCGCGC
G
CTCAATACAACGAAAGAATCGGTTGGCCAGGTGTATCTGTGTACGAATC
G
TTGGTAACAGCCGGCAACTGAGTATCATCATGATGCACAAATTGAAATA
T
CGCGATAAATTAAAATGGCTTTTAGCCCTTCTTGTGCTGATCGGCACTTG
TTTTATTCAGACAAGGGGACAAACAAGAGATCCCAGATTTTATTCTCGG
C
CAGGCGTTGACTACCATTGGCCAAATCCAGGCGATCCGGATTACAGAAC
C
TACACGTTCAACGATCGCCGATATGGTCATTATCAGCCAAATGGCTATG
G
AGCCAACTATCCAGGCAGAAATCCACCGGGACAATATCCACAGGGAAT
GC
CGAATGAAGATCGCTTTCGATTTGACCCGAACGATCCGAATGCGAGAAC
C
CAGTTTCCGGGAGTGCTGGCCGGATGGCGAGAGGATTTGCAGGGCAAGC
A
GCGGCGGGATTCGTTGACCCTGGAGCGGGATGTTTTCGTGACCACCAAC
T
ATGGCCAGGTGCAGGGCTTTAAGGTGTACATGTACGATAATCCAGATCC
G
AAGTCCTTCTATCGTCCCTACCACTCGACCGTGGATCGTGTGATGGGCGA
GTGCTCGGTCTTCCTGGGCATTCCCTACGCCCTGCCGCCCACCTTCGAGG
GCAGGTTCAAGCCACCACGCGTCCATCGAGGCTGGCAGCTGCTGCAGGC
C
GTCGACTTTGGACCCGCCTGTCCACAGCCTGTGCGATATACGGGTGCCA
C
GAAAGGAATCATGGACATGGACGAGGATTGCCTCTACTTGAACGTGTAT
T
CGCCGAAGACTGGTGCTGGTGTGGCTCAAAAATACCCGGTTATGGTGTA
C
ATCCATGGCGGCGAGTTCATTCGTGGAGCCTCCAACCTATTCCAGGGTC
A
TATTCTGGCCTCGTTCTACGACGTGGTCGTGGTGACCCTGAATTACCGCC
TTGGTGCCCTGGGATTCCTATCGACGGGTGATGAGAACTCGCCCGGAAA
C
TACGGAATCCTCGATCAAGCGATGGCGCTACGTTGGGTCTATGACAATA
T
TGAGTTCTTCAACGGCGATCGGAATTCCATCACTCTATTTGGTCCGGGAG
CAGGAGGCGCCTCCGCTGGACTCCTGATGGTGGCACCACAGACGCGGAA
C
ATTGTGCGTCGTGTGATCGCACAGTCCGGATCGGCTCTAGCGGATTGGG
C
GCTCATCCAGGACAAGTATCGCGCCCAGAACACGAGTCGCGTGCTGGGA
C
AGCTGCTGGGCTGCTCCATTGAATCGTCGTGGAAGTTGGTCAACTGCCTG
CGCACCGGACGCAGCTTCTATGAGCTGGGAAACGCTGAGTTCTCTCCCC
A
GGTGGGCAGCTTTCCATGGGGTCCAGTTCTGGACCACAACTTTACGTTGC
CCGGCGACGATTGGTACGAGGGATGGCGCGAAAAGGATTGGCGTTTCCT
C
ACCCAAACGCCGGAAACCCTCATCCGTGCCGGTAAATTCAACCGGAATA
T
TCAGTACATGACGGGCGTGACCACACAGGAAGCGCCTTTTTTGTGGCC
C
AAAACGAATCCCTAAGTCCGTACTATGAACTAGATGGACGTTTCTTCGA
T
CAGAAAATAAGGGAACACGTTTTCCGCTACAACTATACACTTAATCCGA
A
CGGAGTTTACGAGGCCATCAAGTACATATACACCTTCTGGCCGGATCCC
A
ATAATAACACCATAATCCGGGACCAGTACATAAACATGCTGAGTGATCT
C
TACTACCGAGCACCGGTGGATCAAATGGTCAAGCTAATGCTGGAGCAGA
A
GGTACCCGTTTATATGTACGTACTGAACACCACTGTGGAGGCACTGAAT
C
TGCCACAGTGGCGAAAGTATCCACACGACATCGAACGTTATTTCCTCAC
C
GGAGCTCCCTTCATGGACACCGAGTTCTTTCCCAAAAAGGAGCATCTGC
A
GCGCAATATGTGGACGGATAACGATCGCAATATGATCACTTTTTCATG
C
AGACCTACACGAATTTTGCTAGATATGGCAATCCGACGCCGCAACAGGT
G
CTAGGCATGCATTTCCAGCGCGCATACCAGGGCGAGATTCGGTACTTGA
A
CATCAATACCACGTACAACTCCTCCATTCTACTCAACTATCGGCAGACGG
AGTGCGCCTTCTGGACGCAATACTTGCCCACAGTTATTGGAGTGCTGGTG
CCCACTTATCCACCCACCACGGAGTATTGGTGGGAGCCCAAGGAGCCAC
T
ACAGATCGCCTTTTGGAGCATGTCGGTGGCCTGTTTCTTCCTCATAGTCC
TGGTGGTCATCTGCTGCATCATGTGGCGCAATGCCAAGCGCCAATCGGA
T
CGCTTCTATGACGAAGATGTCTTCATTAATGGTGAGGGCTTGGAACCGG
A
ACAGGATACGCGTGGAGTGGACAATGCCCACATGGTGACCAACCATCAT
G
CCCTGCGCTCCAGGGATAATATCTACGAGTACCCGCGACTCTCCATCCACC
AAAACCTTGGCCAGCAAAGCGCACACGGACACCACCTCGTTGCGCTCAC
C
CAGTTCGCTGGCCATGACCCAAAAGTCCAGCAGCCAGGCGTCCCTCAAG
T
CAGGGATCTCGCTCAAGGAAACCAATGGCCATTTGGTGAAGCAATCTGA
A
AGGGAGCCACGCCACGATCCCAACAAAATGGGTCCACCGCAAAGGTG
GC
GTCTCCTCCTGTGGAGGAGAAGCGTCTACTGCAGCCACTTTCCAGCACG
C
CCGTGACGCAGTTGCAGGCGGAGCCGGCCAAAAGAGTTCCCACCGCTGC
C
AGTGTCTCGGGCAGCAGTCGGAGCACCACTCCGGTGCCCTCTGCCCGCA
G
CACCACCACGCACACCACAACAGCCACCCTGAGTTCCCAGCCAGCGGCT
C
AGCCGAGGAGAACCCACCTGGTGGAGGGAGTGCCTCAGACATCCGTTT
C
TCCTGGAATTTTTCTTTAAAGTAAGTTAGTTATTTTCGAAAAAAGTAGTT
TATGTTTTGTATTATGATAGGTTTGTAAACAGATCTTTGAGATCTCAGT
TTTGAGTTGTAGTTTAGGCAAACCTGTATTTCTAATGCCTTACTTTAAGT
TAAATTGTTCGTAAGTTTGATAACCCAACGAATACAAATCCATATCAATG
ACATTCCATAGCCTTATCATCGGCCTTTACGTGTATATATAGAATTTAAA
TGTATAATAAGAATTATTTAAATCTAGGAAATTGCCTGCCTTAACTGAAG
GAAATTAGCTATATAATACAAGTATTTTTATAACAAATGCTGAGCTTAAA
TTTTTAAAACTCACTTTTAGTGGCAGTAATATCGAATGAAATTGTAAAGA
GAGTATATCTTTTAAATCAAATATTAAAATACAAAAATAAATTAACCTTA
TAAAAAATAATGCATTACATTATTTAAGACCTGCTATTATTTGATAACAA
ACTCATAACATTGTCACGTCCCGTATTATAAGAATATCATTAGAATACCA
TTAGATCGTAGCCACTCCCACACATCATCAAGAGCAATACACCTACAGT
G
CCTTAATAATATTTGGTAATTGTCCTCGATGGACCCACCCACCCCATCCA
TGATGTACCAACTAAGTGTGCCTTTCATACATACATAAATGTACTCCTAG
TTATATACTATATATGTTCTATATGTTCTGTGTGTCGCATATAAGCAAAA
TGACCATACAAAATCAGTGT
>Gli|FBgn0001987
MPNEDRFRFDPNDPNARTQFPGVLAGWREDLQGKQRRDSLTLERDVFVTT
NYGQVQGFKVYMYDNPDPKSFYRPYHSTVDRVMGECSVFLGIPYALPPTF
EGRFKPPRVHRGWQLLQAVDFGPACPQPVRYTGATKGIMDMDEDCLYLNV
YSPKTGAGVAQKYPVMVYIHGGEFIRGASNLFQGHILASFDVVVVTLNY
RLGALGFLSTGDENSPGNYGILDQAMALRWVYDNIEFFNGDRNSITLFGP
GAGGASAGLLMVAPQTRNIVRRVIAQSGSALADWALIQDKYRAQNTSRVL
GQLLGCSIESSWKLVNCLRTGRSFYELGNAEFSPQVGSFPWGPVLDHNFT
LPGDDWYEGWREKDWRFLTQTPETLIRAGKFNRNIQYMTGVTTQEAAFFV
AQNESLSPYYELDGRFFDQKIREHVFRYNYTLNPNGVYEAIKYIYTFWPD
PNNNTIIRDQYINMLSDLYYRAPVDQMVKLMLEQKVPVYMYVLNTTVEAL
NLPQWRKYPHDIERYFLTGAPFMDTEFFPKKEHLQRNMWTDNDRNMSHFF
MQTYTNFARYGNPTPQQVLGMHFQRAYQGEIRYLNINTTYNSSILLNYRQ
TECAFWTQYLPTVIGVLVPTYPPTTEYWWEPKEPLQIAFWSMSVACFFLI
VLVVICCIMWRNAKRQSDRFYDEDFINGEGLEPEQDTRGVDNAHMVTNH
HALRSRDNIYEYRDSPSTKTLASKAHTDTTSLRSPSSLAMTQKSSSQASL
KSGISLKETNGHLVKQSERAATPRSQQNGSTAKVASPPVEEKRLLQPLSS
TPVTQLQAEPAKRVPTAASVSGSSRSTTPVPSARSTTTHTTTATLSSQPA
AQPRRTHLVEGVPQTSVFSWNFSLK
Hr39Scim
>>Hr39|FBgn001229|cDNA sequence
GACTGTGTTGCGTCGTGTGATCGCTAGAGCGGTTGTGGAATCGGATTCG
A
GCGCAAAACACCGTTCATGCTGTGAAAAATCCGATATTTGTCGTGCAAT
A
ATTTCCTCGATTGGCATCAAGTGGCTTCCAGTCGGGTACATATTGCACAA
GAAATGTTATACGCATAATGTGCACGCAAATTAAACGAATTCTCTATGA
A
AATGTGACTAGAATGTGAGTCGAACAAAACGAGTAAAACGTGAAATCCC
A
ACTGGCTTTTGGGTAACAAATCTTATCAACACAGCAACGGAAATACATT
A
AAATCTTGATAGACTGAGAAAGGGACAATTGGAATACTTTTAGTTATTTT
TAAATGTTTTATTTTTCAAGTTTTACAACACAATGGAACTGCATCAACGA
CACCTCTCAAACTTTTACAAATTGCACAACTGAGAAATAGTCTTTGATAA
ATAAATAAAATATAAGAAATCGCTACTGAAACAAGATGCCAAACATGTC
C
AGCATCAAAGCGGAGCAGCAAAGCGGTCCTCTTGGAGGAAGTAGCGGC
TA
TCAAGTACCGGTCAACATGTGCACCACCACAGTCGCGAATACGACGACC
A
CTTTGGGAAGCTCCGCCGGGGGAGCCACTGGCTCCCGGCACAACGTCTC
C
GTGACAAACATCAAGTGCGAACTAGACGAACTACCGTCACCGAACGGC
AA
CATGGTGCCGGTTATCGCAAACTACGTTCACGGTAGCTTGCGCATTCCAC
TCAGTGGACATTCAAATCATAGGGAGTCCGATTCGGAGGAGGAGCTGGC
A
AGTATTGAGAACTTGAAGGTTCGGCGAAGGACGGCGGCGGACAAAAAT
GG
TCCTCGTCCAATGTCCTGGGAGGGCGAGCTGAGCGATACTGAGGTCAAC
G
GGGGCGAAGAGCTGATGGAAATGGAGCCAACAATTAAGAGTGAGGTGG
TC
CCTGCTGTTGCACCCCCACAACCCGTCTGCGCACTACAACCGATAAAAA
C
AGAGCTAGAGAACATTGCAGGCGAGATGCAGATTCAAGAGAAGTGTTA
CC
CCCAGTCCAACACACAACATCACGCTGCCACAAAATTAAAAGTGGCCCC
G
ACGCAAAGTGATCCGATCAATCTCAAGTTCGAACCGCCTCTGGGAGACA
A
TTCTCCGCTACTGGCTGCACGTAGCAAGTCCAGCAGTGGAGGCCACCTA
C
CACTGCCAACGAATCCCAGTCCCGACTCCGCCATACATTCCGTCTACAC
G
CACAGCTCCCCCTCGCAGTCGCCTCTGACGTCGCGCCACGCCCCCTACAC
TCCGTCTCTGAGCCGCAACAACAGCGACGCCTCGCACAGTAGCTGCTAC
A
GCTATAGCTCCGAATTCAGTCCCACACACTCGCCCATTCAAGCGCGTCAT
A
GCTATAGCTCCGAATTCAGTCCCACACACTCGCCCATTCAAGCGCGTCAT
GCCCCACCCGCCGGCACGCTCTATGGCAACCACCATGGTATTTACCGCC
A
GATGAAGGTGGAAGCCTCATCCACTGTGCCGTCCAGTGGGCAGGAGGCG
C
AGAACCTGAGTATGGACTCTGCCTCTAGCAATCTGGATACAGTGGGCTT
A
GGATCTTCGCACCCCGCATCTCCGGCGGGCATATCACGTCAGCAGTTGA
T
CAACTCGCCCTGCCCCATCTGCGGTGACAAGATCAGCGGATTTCATTAC
G
GGATTTTCTCCTGCGAGTCTTGCAAGGGCTTCTTCAAGCGCACCGTGCAA
AATCGCAAGAACTACGTGTGCGTGCGTGGTGGACCATGTCAGGTCAGCA
T
TTCCACGCGCAAGAAATGTCCAGCCTGCCGCTTCGAGAAGTGTCTGCAG
A
AGGGAATGAAACTAGAAGCGATTCGGGAGGACCGAACCCGTGGCGGCC
GC
TCCACATACCAGTGCTCCTACACGCTGCCCAACTCAATGCTTAGTCCGCT
GCTTAGTCCTGATCAAGCGGCAGCAGCTGCCGCCGCAGCAGCAGTGGCA
A
GTCAGCAGCAGCCGCACCAGCGACTACATCAACTAAATGGATTTGGAGG
T
GTACCCATTCCCTGCTCTACTTCTCTTCCAGCCAGCCCTAGTTTGGCAGG
AACTTCGGTCAAGTCGGAAGAGATGGCGGAGACGGGCAAGCAAAGCCT
CC
GAACGGGAAGCGTACCACCACTACTGCAGGAAATCATGGATGTAGAGC
AT
CTGTGGCAGTACACCGATGCAGAGCTGGCCCGCATCAACCAACCACTGT
C
CGCATTCGCCTCTGGCAGCTCTTCGTCGTCGTCATCGTCAGGTACATCCT
CAGGCGCCCATGCACAACTCACCAATCCACTACTGGCTAGTGCTGGTCT
C
TCGTCCAATGGCGAGAATGCCAATCCTGATCTTATCGCTCATCTCTGCAA
CGTGGCTGATCACCGTCTTTATAAAATCGTCAAATGGTGCAAGAGCTTG
C
CGCTTTTTAAGAACATTTCGATCGATGACCAAATCTGCTTGCTCATTAAC
TCGTGGTGCGAGCTGTTGCTCTTCTCCTGCTGTTTTAGATCAATTGATAC
TCCTGGAGAGATTAAAATGTCACAAGGCAGGAAGATAACCCTATCGCAG
G
CCAAATCAAATGGCTTGCAGACTTGCATTGAACGGATGCTCAACCTAAC
A
GATCACCTGAGGCGATTGCGCGTTGATCGCTACGAATATGTTGCCATGA
A
AGTTATTGTGCTGTTGCAGTCAGATACGACAGAGTTACAGGAAGCGGTA
A
AGGTGCGCGAGTGTCAGGAAAAAGCTTTGCAGAGCTTGCAAGCTTACAC
C
CTGGCGCATTATCCTGACACGCCATCCAAGTTTGGGGAGTTTTGCTACG
CATTCCTGATTTGCAGCGAACGTGCCAGCTTGGCAAGGAGATGTTGACG
A
TCAAGACTCGCGATGGAGCTGATTTCAATTTGCTAATGGAGCTTTTGCGC
GGAGAGCATTGACAATTGATAACTAAGACGAAATCTTTTACCATTGGC
A
AAACAAGTTTCACATATTTAGTATTAGATATATATATTCTATAGATAAGA
TCCTTACTGTAAGTTCTGAAAACATGTGCCTAAAAACCAAAGCCACGAT
A
GCAGTCACATCAGGCCCACTGGTCGAGATTAAATCCAAGAGCAAGATTG
C
CAAATTTTTACACCAATATATATTTTGATATGAGCCATGTGCAGGGCCTC
AGATCGCTGTTGTTGTCGGCTAAAGTTTCAGTAAGAAAAGTATATATTGA
TTTTGCTATTTATACATATTTGACTTATGTATAGTGTAAACTAAAGCACA
CATGGAAAATGAAAAGACTAAACAAATTTATTTAAAGATTACTTTTACT
A
TTATAGAAAAAGGGGAAAAATAAAAAACACAAAGGCAGAGAAGAAAAT
TT
AGTTACAACAGGTAGCGACATTTTTATATTTTCTTATATAAGGAAATATT
CAATGTATTTTAAATATAAAGCCAAACCCGATTTGGTTTGGGAAAGAGC
T
ACTGAAATTTTTGATATCTATATATTCATCACTAGAAGACGAATGAATGT
ATCCAATGTTTAAATGTTGTAGCGTTTAGTTTTAGTGCAATTTCACACAT
GTCTACATACATGAATATTCAGCGAGATATGTTTGCAAACTATTATAAAG
CAAAAGACCACTCGAAATCGCCATCACTGGGTTGGCTAAGACTATTCCA
G
TTATGCTGTTTGTTGCATAAAAAACCACAACTACGTACATCAATAAAATG
TATAATTTTTTATTGGAGTTTTAGATTTGTATTAACTTCTTCCTTATAAT
TACGATTATTATTATTATTACTAATTTTATGAATATTGTGTAACACTGAC
TTAAATAGCTGAAAAAATCCTGCAACAGGATTTAAAACACCTGAATACA
C
AAAACATTATAACATGAATACATTTTGCTTATGGCCTAGATAGTTTGATA
TGTACTTTGCATATGTATGCATGTGTCTATATGTGAGTACGTACCATACA
AATTCCTGTCCCACCAGAAAAATCACACGCAATAAAAAATTCCAAAATA
C
TAAGCTCGTATCTACAAAGAAAGATTAAAAGACAAATTGATGAATAGGA
A
TATGTTGCCGGAAGTCCAAGAGATTTGGCTGAAAGTATCGACAAATTTT
C
AACACTCGTTCATGGATATTGTGCTAACACTCTCAGTTTGAAAATCATT
TTCTGTTAAACTTTCTATATAATAAGTTCTCCATTCGATTTTGTATTTAC
AATTTGTTTCTTTAATTTTCCTTTATCAGTTGTATCTATGAAACATGAGG
ATCTCAGTTCATATTGATCGTGTTCTTCTGCCGTACACCGCTTCTGTCCG
TTAATGTAAACCATAAGTATAAATGAAATTAGTTAAATGTTTATTTATAA
ATAAAGCGCTATAATAAATTTCAATACATTTATCATAGTTAACTGATTAA
GACCACTGAAATCAAAAATATTTTATTTACTAAGCAAAGCACACGCAAA
C
AATTTATAATGTTTATTACGTTAACAACAAACTCATTTTAATAATTCTT
TATGAATACACAAAGTTACGCAATTTTCCCTCTAGGCGCATTGCTTAAAT
AGTTAAAGAAAAATAATAAACCCATAGCGCAATATTTAATGTAAAACAG
T
TTTCCTTGCGTGTGATGTTTGCTCTAGCTACGTACAAATTCATCATTTAT
TAAATTTAAAACTCAATTTTGCTTTTAAATAAATTTAATAAGTAAAATTC
AACAATAATTGATATACAATTGTCAATGCAATATTTTGTAATAAAAATGC
GAAAAATC
>Hr39|FBgn0010229
MPNMSSIKAEQQSGPLGGSSGYQVPVNMCTTTVANTTTTLGSSAGGATGS
RHNVSVTNIKCELDELPSPNGNMVPVIANYVHGSLRIPLSGHSNHRESDS
EEELASIENLKVRRRTAADKNGPRPMSWEGELSDTEVNGGEELMEMEPTI
KSEVVPAVAPPQPVCALQPIKTELENIAGEMQIQEKCYPQSNTQHHAATK
LKVAPTQSDPINLKFEPPLGDNSPLLAARSKSSSGGHLPLPTNPSPDSAI
HSVYTHSSPSQSPLTSRHAPYTPSLSRNNSDASHSSCYSYSSEFSPTHSP
IQARHAPPAGTLYGNHHGIYRQMKVEASSTVPSSGQEAQNLSMDSASSNL
DTVGLGSSHPASPAGISRQQLINSPCPICGDKISGFHYGIFSCESCKGFF
KRTVQNRKNYVCVRGGPCQVSISTRKKCPACRFEDCLQKGMKLEAIREDR
TRGGRSTYQCSYTLPNSMLSPLLSPDQAAAAAAAAAVASQQQPHQRLHQL
NGFGGVPIPCSTSLPASPSLAGTSVKSEEMAETGKQSLRTGSVPPLLQEI
MDVEHLWQYTDAELARINQPLSAFASGSSSSSSSSGTSSGAHAQLTNPLL
ASAGLSSNGENANPDLIAHLCNVADHRLYKIVKWCKSLPLFKNISIDDQI
CLLINSWCELLLFSCCFRSIDTPGEIKMSOGRKITLSOAKSNGLQTCIER
MLNLTDHLRRLRVDRYEYVAMKVIVLLQSDTTELQEAVKVRECQEKALQS
LQAYTLAHYPDTPSKFGELLLRIPDLQRTCQLGKEMLTIKTRDGADFNLL
MELLRGEH
ScaScim
>>sca|FBgn0003326|cDNA sequence
AAAACATCCTTCCATTGGAAGGTGCTCTAGTGAAATCGGTGATATACTTC
ATCCAGTGCTGCGAGCGAACTTTCCGTGGACCAAAAGTGAAAAGAACAG
C
TAAGCCAAGCAACAAGGATTAAGCCCGAGGAAACGCCTGGAATAATTGT
A
GCATTGTTTGCCAGCGCCTTTTTATAAGGTGTTTGACTGTCACGGCGCCG
GAAAGTCAAGGAGAATTGTTTGTGTGTCGGCATGCGTGCCAGTTATTTGC
ATAAATTGCCCATCTAACTCGAGTTCCCTTTTTTGTGCGGTGTGAATGAG
AGATTGGCAAACATTCCCGGACCTCCAAAAAAAGAAAGTTTCGCGTGAC
C
ATTTAAATTGCCCTGCAACAATGGCAGGTTCAAACGTTTTGTGGCCAATA
CTCCTGGCCGTGGTGCTGCTCCAAATATCCGTGGCATTCGTGAGTGGAGC
GGCCAGTGGTGGGGTAGTCCTTAGCGACGTGAACAACATGTTGCGCGAT
G
CCAAGGTGGTGACCTCGGAGAAACCCGTTGTGCACTCAAAACAGGAAAC
G
GAAGCGCCGGAATCCAGCGTGGAGCTGCTCCGCTTCGTCGATGATGACG
A
GGATAGCGAGGACATCAGCTCCATTGAACGGCAGGATGGCAGGACAAT
GG
AGAGCAAAAAAATGGCCGATCAGGTGCGCCTGTTGACCAAGCAGCTCA
AC
GCCCTGATGCTGCGGCGCCGCGAGGATTACGAGATGCTGGAGCACAATC
T
GCGCAAATCCCTGCGGCTCACCACGAATGCGAACAGCGTGGACGCCGAC
A
TGCGCAGCGAACTGAACCAACTCAGGGAGGAGCTGGCCGCGCTGCGCTC
C
TCGCAGAGTGGCAACAAGGAGCGCTTGACCGTCGAGTGGCTGCAGCAG
AC
GATCTCCGAGATCCGCAAACAGCTGGTGGATCTGCAAAGGACGGCCAGC
A
ACGTGGCCCAGGATGTCCAGCAGCGCAGCTCCACCTTTGAGGATCTGGC
C
ACCATTCGCAGTGACTATCAGCAGCTTAAGCTAGATCTGGCGCTCAGC
G
CGAGCGCCAGCAGCAGACGGAGGTCTACGTCCAGGAACTGCGCGAGGA
GA
TGCTCCAGCAGGAGCAGGACTTCCAGCATGCCCTCGTCAAGCTGCAGCA
G
AGGACTCGCAAGGACGGCTCATCCGCCAGTGTGGAGGAGGAGAGCGGT
AG
CCAGGAAGCCAACCAGGAGCAAACCGGACTTGAAACCACTGCTGATCA
CA
AGCGACGCCATTGCCGTTTTCAGAGCGAACAGATCCACCAGCTGCAACT
G
GCCCAGAGGAACCTGCGCCGACAGGTGAACGGATTGCGCTTCCACCACA
T
CGACGAGCGGGTTCGCAGCATCGAGGTGGAGCAGCACAGGATTGCCAA
TG
CCAACTTTAATTTGAGCAGCCAGATCGCTTCGCTGGACAAGCTGCATAC
C
TCGATGCTGGAGCTGCTGGAAGATGTGGAGGGCCTCCAGACCAAGATGG
A
CAAGAGCATACCGGAGCTGCGGCACGAGATCTCCAAGCTGGAGTTCGCC
A
ATGCTCAGATCACCTCGGAGCAGAGTCTGATCAGGGAGGAGGGCACTAA
T
GCGGCACGATCCCTGCAAGCCATGGCTGTAAGCGTCAGTGTCCTGCAGG
A
GGAGCGCGAAGGTATGCGGAAGCTGTCCGCCAATGTGGATCAGCTGAGA
A
CCAATGTGGATCGATTGCAGTCGCTGGTCAATGATGAAATGAAGAATAA
G
CTCACCCACCTGAACAAGCCGCACAAGCGACCACATCATCAGAATGTCC
A
GGCGCAGATGCCGCAGGATGATTCGCCCATTGACTCCGTCCTGGCCGAA
A
CTCTGGTCAGCGAGCTTGAGAACGTGGAGACCCAGTACGAGGCCATTAT
C
AACAAACTGCCGCACGACTGCAGCGAGGTGCACACTCAAACAGACGGA
CT
GCATCTGATTGCGCCCGCCGGCCAACGGCATCCGCTGATGACGCACTGC
A
CCGCCGATGGATGGACGACGGTGCAAAGGCGGTTCGATGGCAGTGCAG
AC
TTCAACCGCTCGTGGGCGGATTATGCCCAAGGATTTGGGGCGCCAGGCG
G
TGAATTCTGGATTGGCAACGAGCAGCTGCATCACCTGACCCTGGACAAC
T
GCAGTCGGCTGCAGGTGCAAATGCAGGACATCTACGACAACGTTTGGGT
G
GCCGAGTACAAGCGATTCTACATATCCTCGCGAGCCGATGGCTATCGGC
T
GCACATTGCCGAGTACTCCGGCAACGCTTCGGATGCACTGAACTACCAA
C
AGGGTATGCAGTTCTCGGCCATCGATGACGATCGGGACATCTCGCAGAC
G
CACTGTGCTGCTAACTATGAGGGTGGCTGGTGGTTCTCTCATTGCCAGCA
CGCCAATCTCAATGGGCGATACAATCTGGGCCTGACTTGGTTCGATGCC
G
CTCGCAATGAATGGATAGCGGTCAAGTCAAGCCGAATGCTGGTCAAGCG
C
CTGCCCGCCGTCGAGTGCCAGGCGAATGCCAGTGCCAGTGGCGCTTTTG
T
TTCCGTTTCCGGTTCGGCTGCTGATGCTGCGCCGTCGAGCGGTGCAACAA
CAACAACAACAACAGCAACAGCAGCGCCGGCGACGGTAACGACGCCGA
AA
ACCAACAACAGTGTGGTCCAGTTCGTGGCCGCCGGGCAGGCGTAA
>sca|FBgn0003326
MAGSNVLWPILLAVVLLQISVAFVSGAASGGVVLSDVNNMLRDAKVVTSE
KPVVHSKQETEAPESSVELLRFVDDDEDSEDISSIERQDGRTMESKKMAD
QVRLLTKQLNALMLRRREDYEMLEHNLRKSLRTTNANSVDADMRSELNQ
LREELAALRSSQSGNKERLTVEWLQQTISEIRKQLVDLQRTASNVAQDVQ
QRSSTFEDLATIRSDYQQLKLDLAAQRERQQQTEVYVQELREEMLQQEQD
FQHALVKLQQRTRKDGSSASVEEESGSQEANQEQTGLETTADHKRRHCRF
QSEQIHQLQLAQRNLRRQVNGLRFHHIDERVRSIEVEQHRIANANFNLSS
QIASLDKLHTSMLELLEDVEGLQTKMDKSIPELRHEISKLEFANAQITSE
QSLIREEGTNAARSLQAMAVSVSVLQEEREGMRKLSANVQLRTNVDRLQ
SLVNDEMKNKLTHLNKPHKRPHHQNVQAQMPQDDSPIDSVLAETLVSELE
NVETQYEAIINKLPHDCSEVHTQTDGLHLIAPAGQRHPLMTHCTADGWTT
VQRRFDGSADFNRSWADYAQGFGAPGGEFWIGNEQLHHLTLDNCSRLQVQ
MQDIYDNVWVAEYKRFYISSRADGYRLHIAEYSGNASDALNYQQGMQFSA
IDDDRDISQTHCAANYEGGWWFSHCQHANLNGRYNLGLTWFDAARNEWI
A
VKSSRMLVKRLPAVECQANASASGAFVSVSGSAADAAPSSGATTTTTTAT
AAPATVTTPKTNNSVVQFVAAGQA
cnnScim
>>cnn|FBgn0013765|cDNA sequence
CCAGAAACAGCTGTTCCAGCGCGCTTCATTTTCCAAACAGAAAAAAAGT
G
TAATTGTTAGCGTCCTTTGTGAAATTGTCAAGTGTTAGAATTATTGTGTG
CGAAAGTTAACTATTTGAGGACCTCCCATGGACCAGTCTAAACAGGTTT
T
GCGGGACTATTGCGGCGACGGCAATGGTACCTGTGCATCGTCCTTGAAG
G
AAATCACCTTAATTGAGACCGTGACCAGTTTCCTGGAGGAGAATGGCGC
C
GCCGAAATCGACAGAAGGGTCCTGCGCAAACTAGCCGAGGCACTGTCCA
A
AAGCATAGACGACACCAGTCCGGGAGCCCTGCAAGATGTCACCATGGA
GA
ACTCATATGCCAGTTTTGACGTTCCACGACCTCCAGGCGGCGGCAACTC
G
CCCTTGCCGTCACAGGGTCGCTCTGTACGCGAATTGGAGGAGCAGATGT
C
CGCGCTGCGCAAGGAGAACTTCAATCTAAAGCTGCGCATCTACTTCCTC
G
AGGAGGGTCAGCCGGGTGCCCGGGCAGACAGCTCCACAGAATCCTTAA
GC
AAACAGCTCATCGATGCCAAGATCGAAATCGCGACATTGAGAAAAACTG
T
CGATGTAAAGATGGAGCTGCTCAAGGATGCCGCTCGAGCCATTTCTCAT
C
ACGAGGAATTGCAGCGCAAAGCAGACATTGACAGCCAGGCAATAATCG
AC
GAGTTGCAAGAGCAAATACACGCCTATCAGATGGCGGAGTCTGGTGGTC
A
ACCTGTCGAAAATATTGCCAAAACCAGGAAAATGTTGCGCCTTGAATCG
G
AGGTGCAGAGATTGGAGGAGGAACTGGTGAATATCGAAGCTCGTAACGT
T
GCAGCCCGGAACGAGCTGGAATTCATGTTGGCCGAGCGCCTAGAATCCC
T
AACAGCCTGTGAGGGCAAGATTCAAGAGCTGGCCATCAAGAATTCCGAA
C
TGGTAGAGCGTCTTGAAAAGGAAACAGCATCCGCCGAGTCATCCAACGC
C
AATCGAGATCTGGGCGCCCAACTGGCGGATAAGATTTGCGAGCTGCAGG
A
AGCCCAGGAGAAGCTCAAGGAGCGCGAGCGCATCCACGAGCAGGCATG
CC
GCACCATTCAAAAGCTAATGCAAAAGCTAAGCAGCCAGGAGAAGGAGA
CC
GCACCATTCAAAAGCTAATGCAAAAGCTAAGCAGCCAGGAGAAGGAGA
TA
AAGAAGCTCAACCAGGAGAACGAACAGTCGGCAAACAAGGAGAACGAC
TG
CGCTAAGACGGTAATTTCGCCATCCTCCAGCGGCCGTTCCATGAGTGAC
A
ACGAGGCCAGCTCCCAGGAAATGTCCACCAACCTCAGGGTGCGCTACGA
A
CTAAAGATCAACGAGCAGGAGGAGAAGATCAAGCAGTTGCAGACGGAA
GT
AAAGAAGAAGACGGCGAATCTGCAAAATCTGGTCAACAAGGAGCTATG
GG
AGAAAAATCGTGAGGTGGAGCGCCTCACTAAGCTGCTGGCTAACCAACA
CA
GCAATCCTTCACGGAGGCGGAGTACATGAGGGCATTGGAGCGAAACAA
GC
TGCTGCAGCGAAAGGTGGATGTGCTCTTCCAGCGCCTGGCAGACGATCA
A
CAGAACAGCGCTGTGATTGGGCAGTTGCGTTTGGAACTTCAACAAGCTC
G
CACGGAAGTCGAGACGGCGGATAAGTGGCGTCTTGAATGCGTCGATGTC
T
GCAGTGTGCTGACAAACCGATTGGAAGAGCTGGCTGGTTTCCTCAACTC
T
CTGCTGAAGCACAAAGATGTTCTTGGCGTGTTGGCCGCTGATCGACGCA
A
TGCCATGCGTAAGGCGGTGGATCGCAGCTTGGATCTTTCCAAGAGTCTT
A
ATATGACTCTGAATATAACAGCTACATCCTTGGCTGATCAAAGCCTCGCT
CAGCTGTGCAATCTATCCGAGATCTTGTACACCGAAGGTGATGCAAGCC
A
CAAAACTTTCAATTCCCACGAAGAGCTGCACGCCGCTACTTCGATGGCT
C
CGACTGTAGAGAACTTAAAGGCCGAGAATAAGGCTCTTAAAAAGGAGTT
G
GAAAAGCGACGCAGCTCAGAAGGACAGAGGAAAGAGCGCCGCTCCTTA
CC
GCTGCCCTCCCAGCAGTTCGATAACCAGAGCGAGTCAGAGGCCTGGTCA
G
AGCCTGACCGCAAGGTTTCCTTGGCACGCATTGGCCTGGACGAAACCTC
C
AACAGTTTGGCAGCGCCTGAGCAGGCGATCAGCGAGTCGGAGAGCGAG
GG
AAGAACCTGTGCTACCCGTCAGGATCGCAATCGCAACAGTGAGCGTATT
G
CCCAGCTGGAGGAGCAGATTGCCCAGAAAGACGAACGTATGCTTAATGT
G
CAATGCCAAATGGTGGAGCTGGACAATAGATATAAGCAGGAGCAATTGC
G
CTGCCTCGATATTACTCAACAATTGGAGCAATTGCGTGCTATCAACGAA
G
CTCTGACTGCAGACCTGCATGCTATAGGATCACACGAAGAGGAACGCAT
G
GTCGAGTTGCAACGCCAGCTGGAGCTTAAGAACCAGCAGATTGATCAAC
T
AAAACTGGCCCACAGCACTCTGACGGCAGATTCGCAGATAACCGAGATG
G
AGCTGCAGGCGTTGCAGCAGCAAATGCAGGAAATAGAGCAGCTGCACG
CC
GATTCAGTAGAAACCCTGCAATCCCAGCTACAGAAACTCAAACTAGATG
C
CGTGCAGCAGCTAGAAGAGCACGAGCGCCTGCATCGCGAGGCTCTTGAA
C
GCGACTGGGTGGCACTGACCACTTACCAGGAGCAGGCTCAACAGTTGTT
G
GAACTGCAACGATCCCTGGACTATCACCAAGAAAATGAGAAGGAGCTG
AA
GCAGACGCTTGTCGAGAACGAGCTGGCCACGCGGGCCCTCAAAAAGCA
GC
TAGACGAAAGCACTCTGCAGGCCTCCAAGGCGGTGATGGAGCGCACAA
AG
GCCTACAACGACAAGCTGCAACTGGAGAAGCGTTCCGAGGAATTGAGG
CT
GCAACTGGAGGCGCTCAAGGAAGAGCATCAAAAGCTGCTGCAGAAGCG
CT
CCAACAGCAGCGACGTTTCCCAGTCCGGTTACACATCCGAAGAGGTGGC
G
GTGCCCATGGGGCCACCTTCGGGTCAGGCTACAACGTGCAAACAGGCTG
C
TGCCGCAGTTTTGGGCCAGAGGGTGAACACATCATCTCCCGATCTGGGC
A
TAGAAAGCGATGCCGGCAGGATATCTAGCGTAGAAGTATCCAACGCCCA
A
CGTGCGATGCTTAAGACTGTAGAGATGAAAACGGAGGGATCAGCGAGTC
C
AAAGGCAAAGTCAGAGGAATCTACATCACCGGACAGCAAGAGCAACGT
GG
CAACTGGTGCAGCCACAGTACACGACTGTGCCAAGGTAGATCTTGAAAA
C
GCCGAGTTGCGGCGCAAACTAATCCGCACCAAGCGCGCATTTGAAGACA
C
CTACGAAAAGTTGCGTATGGCTAACAAAGCAAAAGCACAAGTTGAGAA
AG
ACATCAAAAATCAAATACTAAAAACGCACAATGTGCTGCGAAACGTTCG
C
TCAAACATGGAGAATGAGTTATAACGATCGCGCCGACGTCCAGTATATC
A
GCATTAACCCGAGAGGCCATTCACCCAATGTTCAATTGCCATTTCTTGCC
ATTCTTATATTTTGTATGCATTGTATTTTGTTGTCTCGTTGCTAACTTGA
TATCAATTATTTATGTGTTTTCTTCTATTTTTTTTTTTTAAAAAGA
CCGTAAACAACGAAGCTATTAGTACGAAATACCCATGCATTTTCTAAAG
A
CTGTTGAGGGAATCGAACCCATTGAATGAACTATCACACACACACACAC
A
CACACCTGTTTTAAGCACAAAACGAAACTAACTTGAAACTTGAAGTGCT
G
AAAATATGTATCTAACCCGGCGCACTCATTCATATTGAATGACACATGT
A
TATTAGAATGTATATATATATATATCCCCTAGTACCATAACTTTAACGAA
TATTCTCTAGCATACTCGACCTGATTCTTGTCTCGCATAACCCTCCATTT
TCCAATCATTTGCGTGTAGTGACTGCCTGATTAATGTATTCTCCTGCTGC
TTAACTGCTCTTAATCCTTGATTTCAGTTAACCATCGAAACGGATATTGA
AATAATTGTTTGACTTGCCGGACAAAACAGTTTAGCTACGTTGCCATCCA
ATAACCCTTTTTGTTCGAAACATCCATTTGTACAATGTGTAAAAAGTAGT
GTGCGTTGTCCTGGAGAACAAGATCTAGAACTTAAGTCATTTGTACCCGT
CGTTTTATGGAATAAACAATTGCGTTAGAATTA
>cnn|FBgn0013765
MDQSKQVLRDYCGDGNGTCASSLKEITLIETVTSFLEENGAAEIDRRVLR
KLAEALSKSIDDTSPGALQDVTMENSYASFDVPRPPGGGNSPLPSQGRSV
RELEEQMSALRKENFNLKLRIYFLEEGQPGARADSSTESLSKQLIDAKIE
IATLRKTVDVKMELLKDAARAISHHEELQRKADIDSQAIIDELQEQIHAY
QMAESGGQPVENIAKTRKMLRLESEVQRLEEELVNIEARNVAARNELEFM
LAERLESLTACEGKIQELAIKNSELVERLEKETASAESSNANRDLGAQLA
DKICELQEAQEKLKERERIHEQACRTIQKLMQKLSSQEKEIKKLNQENEQ
SANKENDCAKTVISPSSSGRSMSDNEASSQEMSTNLRVRYELKINEQEEK
IKQLQTEVKKKTANLQNLVNKELWEKNREVERLTKLLANQQKTLPQISEE
SAGEADLQQSFTEAEYMRALERNKLLQRKVDVLFQRLADDQQNSAVIGQL
RLELQQARTEVETADKWRLECVDVCSVLTNRLEELAGFLNSLLKHKDVLG
VLAADRRNAMRKAVDRSLDLSKSLNMTLNITATSLADQSLAQLCNLSEIL
YTEGDASHKTFNSHEELHAATSMAPTVENLKAENKALKKELEKRRSSEGQ
RKERRSLPLPSQQFDNQSESEAWSEPDRKVSLARIGLDETSNSLAAPEQA
ISESESEGRTCATRQDRNRNSERIAQLEEQIAQKDERMLNVQCQMVELDN
RYKQEQLRCLDITQQLEQLRAINEALTADLHAIGSHEEERMVELQRQLEL
KNQQIDQLKLAHSTLTADSQITEMELQALQQQMQEIEQLHADSVETLQSQ
LQKLKLDAVQQLEEHERLHREALERDWVALTTYQEQAQQLLELQRSLDYH
QENEKELKQTLVENELATRALKKQLDESTLQASKAVMERTKAYNDKLQLE
KRSEELRLQLEALKEEHQKLLQKRSNSSDVSQSGYTSEEVAVPMGPPSGQ
ATTCKQAAAAVLGQRVNTSSPDLGIESDAGRISSVEVSNAQRAMLKTVEM
KTEGSASPKAKSEESTSPDSKSNVATGAATVHDCALVDLENAELRRKLIR
TKRAFEDTYEKLRMANKAKAQVEKDIKNQILKTHNVLRNVRSNMENEL
pavScim
>>pav|FBgn0011692|cDNA sequence
CTTGGCGCTGTAAATTTGAAGGTAACGAACTAAAAGAGAGATCGATTCC
A
GCAACAAAACAAGAAGAAACCCAACTCCCGTATATCAAATTAGTTGCAA
A
AACGAGCTGACAACATGAAGGCAGTACCCAGGACGCCGATGCGTGTCGT
C
CCGAAAACTCCGCGGGTGCATCAAACGGTGGAGAAACAGCGACGAGAC
AC
CTCCGACAAGGCCAGGGATCCAGTGAATGTGTTCTGTCGAGTGCGGCCA
C
TACAATCCGACGCAGATCTCACCTCCCTAAGGGTCAAGAACTCCACGAC
G
ATCGCACTGAATCCGCAGGATCAGCTGCTGCAGCATCACAAGCCACACA
A
CGGCGCCCAGCGCGAGGTTCAGTACATATTCAAGCACGTTTTCCAGCCG
G
ATGCCACGCAGCAGGATGTGTACGCAGCTGTGGCCCAGCCGTTGGTGGA
G
AACCTACTGAAAGGCCGAAACAGTCTGCTTTTCACCTACGGCGTGACTG
G
AAGTGGAAAAACGTACACCATGACCGGCAACCTGCGACACCGCGGCAT
CA
TGCCGCGCTGCCTGGACGTGCTCTTTCGCACCATTTCAGATTACCAGGCC
AAGAAGTTCGTCTTCAAGCCGGACAAGCTTAATGGCTTCGAGATCCTGT
C
CGAAGAGGATGCGCTTTTGGAGCGCCAACACGAGATGAACCAGCGTTTT
CTGGCTCAGGACGATTTGCCTTCAGGCACAAGGACTCGGATCCGGAAAT
T
GCATCCCAGGCCTCCGTGGAGCCAATTCCGCTGCTGGGTTTGGATGAGG
A
CAACATGTACTCGGTGTTTGTCACCTATATTGAAATTTACAATAACAGCG
TCTACGACCTCCTTGAGGACTCGGGTATACAGAAGACTTTGCAGAGCAA
A
ATCATTCGTGAAGATGCCAATCGACACATGTTCGTCCACGGCGTCACAG
A
GGTGGAGGTCAAGACCGTGGAGGACGCCCTCGAGGTCTTTCAAATGGGC
C
AGAAGCGCAAACGAATGGGACACACTGTTCTCAATGCAGAATCCAGTAG
G
AGTCACTCGGTGTTCAATATACGCTTGGTGCAGGCGCCCACTGATAGCC
A
GGGTGAGAATGTGGTTCAGGACCGGCAAAACATCACAGTGAGTCAACTG
T
CCCTGGTGGATCTGGCGGGCAGTGAGCGATCCTCAAGGACCAAGAACAC
C
GGTGTGCGACTCCGTGAGGCGGGCAACATCAATAATTCGCTGATGACGC
T
GCGCACTTGCCTGGAATATCTGCGCGAGAACCAACTCGCGGCTAGCAAT
G
GATTGGCACCCAAGAAGGTCCCCTATCGAGACTCCAAGATCACACACAT
G
TTTAAAAACTACTTCGATGGCGAAGGCCAGGTGTCCATGATTGTGTGCAT
CAACCCAAGAATTGAGGACTATGATGAGAATATGCAAGTGATGAAGTTC
G
CCGAGATGACCCAGGAGGTGCAAATTGCTCGGGCGACTCCTATGAAGCA
A
GATTTGGGTCTGACTCCCGGCCGTCGCAAGGCCAACAAGCTGTTCAAGA
T
TGCCGTTAATAATCTAAACGAGCTGGGCATTCCTGAGGCCAAGGATTTG
G
AGGTGGACGTGGGTTTGGTGTACAGTTTGGGACCCGATTTTCCCGCCTAC
GAAATGGACAGTCCCGAGGCACAGATCAAAATCCGCGAGCTAATGCATT
A
TCTGGAGCAGCGCATAGAAAAGCGAAAGAAGCTGCGTGCCAACTTGGA
CA
TTAAATGTGACAGCTTCCGGCAGATGCTGATGAACCTTGACCGCGACAA
T
CTTCAGCTGCGCACGGAGCTCGCCTCCTTAAAGGCTGTTTACAAGCAGG
A
GCGCGATCGCAGTGCGGCACTCGAGAAGAAGGTTCGCATCCACGAGAG
CT
CCATTGACGTGCCTAACAATACGCTAAGCAAGCAAGAACGGCAGATTGA
A
GAGCTGACTTTCAAGCTGAACGAGAAGGAGAATATGCTCACCCAAAAGG
A
GCACGAGAAGGAAAAGCAAAAGAAGAAGTTCAGCTCCAAGCTGGCCGT
TG
AGTCGGACAAAAATAAGCGAGAGTTTGAACTAAAGCTGCGTGAACAGC
GA
GTGAAATTGCAGGAACGCATGCGCATCAAGGACGAGAAGTTGCGATTGG
T
CTCCAACATTCTGCAGTCCGAAGATCTGCCCAGTTTGCCGCGGTCACAG
A
GCTCGGAAAACATACTTAATGAGAAAGATCGCGGTGCATATACGGCGCG
C
ACGGAGGAGTCCTCGGTGCCAGCTACACGAACAGATATATATGCAACGC
C
ACGTCATGGTGCAGCAGCGGCCAACAATCGGCATAGACGCTCTCGATCC
G
CAGGCGACAAGTGGCTGGAGCATCGGGCAGCTAATCCCGTTCCGCTTGG
C
ACTATTATGCAGCCGTATCTGAAGAATCGCAAATCCGTAACGAAACTAA
C
CGACTTGAAGGAGTTGACTGCTCACGGAACTACGAAGTACTGTCTCGTC
T
CGCAGGATGCGGATACGGATGGCGATGTGGAGACGAAGCTGTATAAGG
GC
AATGTAATTCCCACTTGTGGCGGTGGTGCCCAAGTTGTGTTCAACGATGT
GGAGTGCCTCAAGCAGAAGTCACCGGTTCACTCGCCCACGCGAAAGCGA
C
CCAGCAATGGCAACATTTCGGCTCTGGGCGGCGGTGCAGTGCCCAGCAC
G
GTCACCTCAGCCCAGGACGTAGCCTCCCGCTGCAATCTCGGCATTGAGG
G
ACACAGCAGCAAGAAGTCGAAAATCTAAAAATGA
>pav|FBgn0011692
MKAVPRTPMRVVPKTPRVHQTVEKQRRDTSDKARDPVNVFCRVRPLQSDA
DLTSLRVKNSTTIALNPQDQLLQHHKPHNGAQREVQYIFKHVFQPDATQQ
DVYAAVAQPLVENLLKGRNSLLFTYGVTGSGKTYTMTGNLRHRGIMPRCL
DVLFRTISDYQAKKFVFKPDKLNGFEILSEEDALLERQHEMNQRFAGSGR
FAFRHKDSDPEIASQASVEPIPLLGLDEDNMYSVFVTYIEIYNNSVYDLL
EDSGIQKTLQSKIIREDANRHMFVHGVTEVEVKTVEDALEVFQMGQKRKR
MGHTVLNAESSRSHSVFNIRLVQAPTDSQGENVVQDRQNITVSQLSLVDL
AGSERSSRTKNTGVRLREAGNINNSLMTLRTCLEYLRENQLAASNGLAPK
KVPYRDSKITHMFKNYFDGEGQVSMIVCINPRIEDYDENMQVMKFAEMTQ
EVQIARATPMKQDLGLTPGRRKANKLFKIAVNNLNELGIPEAKDLEVDVG
LVYSLGPDFPAYEMDSPEAQIKIRELMHYLEQRIEKRKKLRANLDIKCDS
FRQMLMNLRDNLQLRTELASLKAVYKQERDRSAALEKKVRIHESSIDVL
NNTLSKQERQIEELTFKLNEKENMLTQKEHEKEKQKKKFSSKLAVESDKN
KREFELKLREQRVKLQERMRIKDEKLRLVSNILQSEDLPSLPRSQSSENI
LNEKDRGAYTARTEESSVPATRTDIYATPRHGAAAANNRHRRSRSAGDKW
LEHRAANPVPLGTIMQPYLKNRKSVTKLTDLKELTAHGTTKYCLVSQDAD
TDGDVETKLYKGNVIPTCGGGAQVVFNDVECLKQKSPVHSPTRKRPSNGN
ISALGGGAVPSTVTSAQDVASRCNLGIEGHSSKKSKI
rfc4Scim
NOTE:need to use rfc40 to recover the DNA and
amino acid sequences from FlyBase
>>RfC40|FBgn0015287|cDNA sequence
ATGCCGGAAGAACCAGAGAAAACGGCGGACGACAAGCGCAGTCACTTG
CC
GTGGATTGAGAAGTACCGCCCCGTGAAGTTCAAGGAGATAGTGGGCAAT
G
AGGATACCGTAGCAAGACTATCCGTATTCGCCACCCAGGGAAATGCACC
C
AATATTATTATTGCTGGTCCTCCTGGCGTGGGCAAGACAACCACAATCCA
GTGTCTGGCCAGGATTCTCCTGGGAGACAGCTACAAGGAGGCTGTCCTC
G
AGCTGAATGCCTCCAATGAACGAGGAATCGATGTGGTCCGCAACAAGAT
C
AAGATGTTTGCTCAGCAGAAGGTGACACTGCCGCGGGGCAGGCACAAG
AT
TGTGATTCTGGACGAGGCGGACAGCATGACGGAGGGTGCCCAGCAGGC
AC
TGCGCCGGACCATGGAGATCTACAGCAGCACCACTCGTTTTGCCCTGGC
C
TGCAACACCAGCGAGAAGATCATAGAGCCTATCCAGTCCCGCTGCGCCA
T
GCTACGATTCACCAAGCTGTCCGATGCGCAAGTTCTGGCCAAGCTCATC
G
AGGTGGCCAAGTGGGAGAAGCTTAACTACACGGAGGACGGACTTGAGG
CC
ATCGTATTCACTGCCCAAGGTGATATGCGACAGGGACTGAACAACCTGC
A
GTCCACCGCTCAGGGATTTGGCGACATCACCGCTGAGAACGTCTTTAAG
G
TCTGCGACGAGCCGCACCCAAAGCTCCTAGAGGAGATGATCCACCATTG
C
GCTGCTAACGACATACACAAGGCCTACAAAATCCTGGCCAAGCTGTGGA
A
GCTGGGATACTCGCCGGAGGACATCATTGCGAACATATTCCGTGTCTGC
A
AGCGCATCAACATCGATGAGCATTTGAAGCTGGACTTTATCCGTGAGAT
C
GGAATCACCCACATGAAGATTATCGATGGTATCAACTCGCTGCTGCAGC
T
CACCGCCCTTCTGGCCAAACTCTGCATTGCCGCCGAGAAGCATTAG
>RfC40|FBgn0015287
MPEEPEKTADDKRSHLPWIEKYRPVKFKEIVGNEDTVARLSVFATQGNAP
NIIIAGPPGVGKTTTIQCLARILLGDSYKEAVLELNASNERGIDVVRNKI
KMFAQQKVTLPRGRHKIVILDEADSMTEGAQQALRRTMEIYSSTRFALA
CNTSEKIIEPIQSRCAMLRFTKLSDAQVLAKLIEVAKWEKLNYTEDGLEA
IVFTAQGDMRQGLNNLQSTAQGFGDITAENVFKVCDEPHPKLLEEMIHHC
AANDIHKAYKILAKLWKLGYSPEDILANIFRVCKRINIDEHLKLDFIREI
GITHMKIIDGINSLLQLTALLAKLCIAAEKH
LanAScim
>>LanA|FBgn0002526|cDNA sequence
AGCCATCCAGTGCGGTTGGATGAGCTCCACCAAAGGAATACGAAAAGA
AC
AGTGAAAAAAGTGAAATACAGCAGATAAGAAAGTGAAATACATACATA
AG
TGAACCGGGAAAGAAAGAGATAGAACCGGAAGTGGTCCGTGGAGAAG
GA
CTGTCGTTATCGCAGCGCGGGTGCTTGAACTCTCGGCACAATGGGGCAC
G
GAGTGGCCTCCATTGGGGCTCTGCTAGTAATCCTGGCCATCTCCTATTGC
CAGGCGGAGCTAACGCCACCATATTTCAATCTGGCCACGGGCAGGAAGA
T
TTATGCCACAGCTACGTGTGGCCAGGATACGGATGGACCAGAGCTCTAC
T
GCAAACTAGTGGGAGCCAATACGGAACACGATCATATCGACTATTCAGT
T
ATCCAGGGACAGGTCTGCGATTACTGCGATCCCACGGTGCCGGAGAGGA
A
TCATCCGCCAGAGAACGCGATCGATGGCACCGAGGCCTGGTGGCAGAGT
C
CTCCGTTGTCCAGGGGCATGAAATTCAATGAAGTCAATTTGACCATCAA
C
TTCGAACAGGAATTCCATGTGGCCTATTTGTTCATTCGCATGGGCAACTC
CCCTCGTCCGGGTCTCTGGACGCTGGAGAAGTCCACGGATTATGGCAAG
A
CCTGGACGCCTTGGCAGCACTTTTCCGATACCCCCGCCGATTGTGAGACG
TACTTTGGCAAGGACACCTACAAGCCAATTACCCGCGACGACGACGTCA
T
CTGCACCACTGAATACTCAAAGATTGTGCCGCTGGAGAACGGCGAGATT
C
CCGTGATGCTGCTCAATGAGCGACCCAGTTCACCAACTACTTCAACTCA
ACGGTGCTGCAGGAATGGACTCGTGCCACTAACGTCAGGATTCGTCTGC
T
TCGCACCAAGAATCTTTTGGGACATTTGATGTCTGTGGCTCGACAAGATC
CCACGGTGACGCGTCGCTACTTCTACTCGATCAAGGACATCTCGATCGG
A
GGAAGGTGCATGTGCAATGGACACGCCGACACCTGTGACGTCAAGGACC
C
GAAGAGCCCAGTCCGCATCCTCGCATGCCGTTGCCAGCATCACAGTGC
G
GCATCCAGTGCAACGAGTGCTGTCCTGGATTCGAGCAGAAAAAGTGGCG
C
CAAAACACCAATGCCCGACCATTCAACTGCGAACCCTGCAACTGTCATG
G
TCACAGCAACGAGTGCAAGTACGATGAGGAAGTGAACCGCAAGGGACT
GT
CCCTGGACATTCACGGACACTACGATGGTGGTGGTGTTTGCCAGAACTG
T
CAGCACAATACCGTGGGAATTAACTGCAACAAGTGCAAGCCGAAATACT
A
TAGACCCAAGGGCAAGCACTGGAACGAGACCGATGTCTGCAGCCCCTGC
C
AATGCGACTACTTCTTCTCCACCGGACACTGCGAGGAGGAGACCGGAAA
C
TGTGAGTGCCGTGCTGCCTTCCAACCGCCAAGTTGCGACTCCTGCGCGTA
TGGATACTATGGTTACCCCAATTGCCGGGAGTGCGAATGTAATCTGAAT
G
GAACCAATGGCTACCACTGCGAGGCTGAAAGCGGACAGCAGTGCCCGT
GC
AAGATCAATTTCGCGGGGGCCTACTGTAAGCAGTGCGCCGAAGGATACT
A
CGGATTCCCCGAGTGCAAGGCATGCGAGTGCAACAAAATCGGCTCGATT
A
CCAACGACTGCAACGTGACCACTGGAGAGTGCAAGTGCTTGACCAATTT
C
GGAGGCGACAACTGCGAGCGCTGCAAGCACGGATACTTCAACTACCCTA
C
TTGCTCATACTGCGACTGCGACAACCAGGGCACGAGTCGGAAATCTGC
A
ACAAGCAGTCTGGCCAGTGCATCTGTCGTGAAGGTTTTGGAGGCCCAAG
A
TGCGATCAGTGCTTGCCAGGATTTTACAACTATCCGGACTGCAAGCCAT
G
CAACTGCTCCAGCACGGGTAGTTCGGCGATCACCTGCGACAACACGGGC
A
AATGTACCTGCCTCAACAACTTTGCCGGGAAACAGTGCACGCTCTGTAC
T
GCCGGATACTACAGCTATCCGGATTGTCTACGGAGTGTCCTGTAATTCAG
ACGGACAGTGCTTGTGTCAGCCCAACTTTGACGGACGTCAGTGCGATTC
C
TGTAAGGAGGGCTTCTACAACTTCCCCAGCTGCGAGGACTGCAACTGTG
A
TCCTGCAGGAGTGATCGATAAGTTCGCCGGATGCGGATCGGTGCCCGTG
G
GTGAGCTCTGCAAGTGCAAGGAGCGAGTGACGGGCAGGATCTGCAATG
AG
TGCAAGCCATTGTACTGGAACCTGAACATCAGCAATACTGAGGGATGTG
A
GATTTGCGATTGTTGGACAGATGGTACTATTTCCGCACTGGACACCTGTA
CCTCGAAGTCCGGACAGTGTCCCTGCAAGCCGCATACTCAAGGCAGGCG
C
TGCCAGGAGTGTCGGGATGGTACCTTCGATCTGGACAGTGCCTCGCTGTT
TGGCTGCAAGGACTGCAGTTGCGATGTGGGCGGCTCGTGGCAAAGTGTT
T
GCGACAAGATCAGCGGACAGTGTAAGTGCCACCCGAGGATTACGGGTCT
G
GCATGTACCCAGCCACTGACCACCCACTTCTTCCCAACGCTGCATCAGTT
CCAGTACGAATACGAGGATGGATCACTACCATCGGGCACTCAGGTGCGC
T
ACGACTACGATGAGGCGGCATTCCCCGGATTTAGCAGCAAGGGCTATGT
G
GTGTTCAACGCCATTCAGAACGATGTACGGAACGAGGTCAATGTCTTTA
A
GTCATCTCTGTATCGTATTGTCCTGCGATATGTGAATCCAAATGCCGAGA
ATGTCACTGCCACCATTTCGGTTACTTCAGACAATCCTCTGGAGGTTGAT
CAGCACGTTAAGGTTCTACTGCAACCCACATCGGAACCTCAGTTCGTAA
C
TGTTGCGGGTCCCTTGGGAGTGAAACCCTCAGCCATTGTTTTGGATCCGG
GTCGTTATGTATTTACCACCAAGGCCAACAAGAATGTGATGCTTGATTAC
TTTGTTCTCCTACCCGCCGCTTACTACGAAGCCGGAATTCTAACGCGCCA
CATCTCAAATCCCTGTGAACTGGGCAACATGGAGCTGTGCCGTCACTAC
A
AGTACGCCTCTGTGGAAGTGTTCTCACCAGCGGCAACTCCATTCGTCATC
GGTGAAAACTCCAAGCGGACAATCCCGTCGAGACGTACACTGATCCGG
A
GCATCTGCAGATTGTGAGCCATGTCGGTGATATTCCCGTACTGAGCGGA
T
CCCAAAATGAGCTGCACTACATCGTGGATGTGCCACGAAGTGGCCGGTA
T
ATCTTCGTGATTGACTACATCAGCGATAGGAACTTCCCCGACAGTTACTA
TATCAACTTAAAACTAAAGGATAATCCAGATTCGGAAACATCCGTGCTG
T
TGTATCCATGCTTATACTCGACTATTTGCCGAACATCAGTTAACGAGGAT
GGTATGGAGAAGTCATTCTATATTAACAAAGAGGATTTGCAGCCAGTCA
T
CATCTCCGCTGACATCGAAGATGGTTCTCGTTTCCCGATTATCTCGGTGA
CAGCAATTCCCGTCGACCAATGGTCCATTGACTACATCAACCCAAGTCC
C
GTCTGTGTGATCCATGATCAGCAATGCGCCACTCCGAAATTCCGTTCCGT
TCCCGATTCCAAGAAGATCGAGTTCGAAACTGATCATGAGGACCGTATT
G
CCACCAACAAACCTCCATATGCCTCACTCGATGAACGAGTTAAGCTGGT
C
CACTTAGACAGTCAAAATGAAGCAACCATCGTGATTGAATCAAAGGTTG
A
TGCTACAAAACCGAATCTATTTGTGATCCTGGTGAAGTACTACCAACCG
A
GCCACCCCAAATACCAGGTGTACTACACGCTGACAGCGGGCAAGAACCA
G
TACGATGGCAAGTTCGACATTCAGCACTGTCCATCGAGTTCCGGATGCC
G
CGGTGTGATACGCCCCCGGAGAGGGTTCGTTCGAGATTGACGACGAG
T
TCAAGTTCACGATTACGACCGATCGATCCCAGAGCGTTTGGCTGGACTA
C
CTGGTGGTGGTTCCCTTGAAGCAGTACAATGATGACCTACTGGTGGAAG
A
GACCTTCGACCAGACCAAGGAGTTCATTCAGAACTGCGGCCATGACCAC
T
TCCACATAACCCACAATGCCAGTGATTTCTGCAAGAAATCCGTTTTCTCT
CTAACAGCCGATTACAATAGTGGAGCATTGCCTTGCAATTGCGACTACG
C
CGGATCCACGAGCTTCGAGTGTCATCCGTTCGGAGGTCAGTGCCAGTGC
A
AGCCGAATGTGATTGAGCGCACGTGCGGAGCCTGTCGCAGTAGATACTA
C
GGATTCCCCGACTGCAAGCCATGCAAGTGTCCCAATAGCGCCATGTGTG
A
GCCCACCACTGGTGAGTGCATGTGTCCGCCCAATGTCATTGGGGATTTGT
GCGAGAAGTGCGCCCCCAACACCTATGGATTCCATCAGGTCATTGGCTG
C
GAGGAGTGTGCATGCAATCCTATGGGCATTGCAATGGAAACTCCCAGT
G
CGATCTGTTCAATGGAACCTGCGAGTGTCGGCAAAATATCGAGGGCAGG
G
CCTGTGATGTTTGCTCCAATGGATACTTTAACTTCCCGCACTGCGAGCAG
TGCAGTTGCCACAAGCCCGGCACCGAACTGGAGGTGTGTGACAAGATCG
A
TGGCGCATGCTTCTGCAAGAAGAATGTGGTTGGAAGGGACTGTGACCAG
T
GTGTCGATGGAACATACAATCTGCAGGAGTCGAATCCGGATGGTTGCAC
C
ACTTGCTTCTGCTTTGGCAAGACTTCGCGATGCGACAGTGCCTATCTCAG
AGTTTACAATGTGAGCCTGCTTAAGCATGTGTCCATCACTACTCCGGAAT
TCCACGAGGAGAGCATCAAGTTTGATATGTGGCCCGTACCCGCGGATGA
A
ATTCTTCTGAATGAGACCACGCTGAAGGCAGACTTTACCTTACGGGAGG
T
CAACGATGAACGACCTGCGTACTTTGGGGTTCTGGACTATCTGCTTAACC
AGAATAATCACATCTCTGCTTATGGCGGAGACCTGGCTTATACTTTACAT
TTCACTTCTGGCTTCGACGGCAAATACATTGTGGCTCCGGATGTAATTTT
GTTCAGTGAACACAATGCCCTGGTCCATACAAGCTATGAGCAGCCCAGC
C
GAAATGAACCATTCACCAACCGCGTCAATATAGTGGAATCGAATTTCCA
G
ACGATTTCCGGAAAACCAGTTTCACGAGCTGATTTCATGATGGTTCTGCG
GGATCTAAAAGTAATCTTTATCAGAGCCAACTATTGGGAACAGACCTTG
G
TGACCCACCTGTCCGATGTGTATCTAACTCTAGCCGATGAGGATGCAGA
T
GGCACTGGCGAATACCAGTTCCTGGCCGTGGAGCGTTGCTCCTGCCCAC
C
TGGTTACTCCGGACACTCGTGCGAGGACTGTGCCCCGGGCTACTACCGA
G
ATCCCAGCGGACCTTATGGTGGTTACTGCATCCCTGCGAGTGCAATGG
A
CATTCGGAGACCTGTGATTGCGCTACCGGAATCTGTTCAAAGTGCCAGC
A
TGGAACAGAGGGTGATCACTGTGAGCGCTGTGTGTCCGGTTACTATGGA
A
ACGCCACGAATGGAACACCCGGAGATTGTATGATCTGCGCTTGCCCACT
G
CCATTTGACTCGAACAACTTTGCCACCAGTTGCGAAATCTCCGAGAGCG
G
AGACCAAATCCATTGTGAGTGCAAGCCAGGATATACAGGACCACGTTGC
G
AGTCTTGCGCCAATGGTTTCTATGGAGAGCCAGAGAGCATAGGACAGGT
G
TGCAAGCCGTGCGAGTGTTCCGGTAACATCAATCCAGAGGATCAGGGAT
C
TTGCGACACTAGGACCGGTGAATGTCTTCCGCTGCTTGAATAACACCTTC
GGTGCTGCCTGTAATCTGTGTGCACCTGGATTCTATGGCGATGCTATCAA
GCTAAAGAACTGCCAGAGCTGCGACTGCGATGATCTGGGCACCCAGACGT
G
TGATCCCTTTGTGGGCGTCTGCACCTGTCACGAGAACGTCATTGGCGACC
GTTGCGATCGCTGTAAGCCGGATCACTATGGATTTGAGTCAGGTGTTGG
G
TGCCGAGCCTGCGACTGCGGTGCTGCCTGCCAATTCAACGCAGTGTGACC
C
ACACACAGGTCACTGTGCCTGCAAGTCGGGAGTGACAGGACGACAGTGC
G
ATCGATGCGCCGTTGACCATTGGAAATACGAAAAGGACGGTTGCACTCC
G
TGCAATTGCAATCAGGGATACTCACGAGGATTCGGTTGCAATCCCAACA
C
CGGCAAGTGCCAATGTCTGCCAGGAGTAATTGGAGATAGATGCGACGCT
T
GTCCGAATCGATGGGTTCTGATCAAGGATGAAGGCTGTCAGGAGTGCAA
C
AACTGCCACCACGCCCTTTTGGATGTCACTGATCGAATGCGCTATCAGAT
CGATAGTGTCCTGGAGGACTTTAACAGTGTAACCCTGGCCTTCTTCACCA
GTCAAAAATTGAACTATTACGACCAGCTGGCCGATGAACTGGAGCCCAA
G
GTTAAGCTATTGGATCCCAACAGCGTGGACCTGAGTCCATCCAAAAAGG
C
CAACAGCGAATTGGAATCCGATGCCAAGTCCTATGCCAAACAGGTCAAC
C
AGACCCTGGCCAACGCCTTCGATATCCGTGAGCGATCGAGCACCACTTT
G
GGTAACATAACAGTTGCTTATGATGAGGCGGTCAAGAGTGCCGACCAGG
C
CAAAGAGGCCATCGCTTCGGTGGAAGCTCTTTCCAAGAATCTCGAGGCG
G
CAGCGAGCACAAAGATTGATGCTGCTCTGGAGCAAGCACAGCACATTTT
G
GGACAAATCAACGGAACCAGCGCAAAACAAGAGCCTCAATGCCCTCAA
GA
ATGATATTGGAGAATTCAGCGACCATCTGGAAGATCTTTTCAACTGGAG
C
GAAGCTTCACAAGCCAAGTCCGCTGACGTTGAGCGCCGCAATGTGGCCA
A
CCAGAAGGCCTTTGACAACTCTAAATTCGACACCGTTTCGGAGCAAAAG
C
TACAGGCAGAGAAGAACATCAAAGATGCTGGCAATTTCCTCATCAATGG
C
GATCTGACCCTGAATCAAATTAATCAGAAGTTGGATAACTTGAGAGATG
C
TCTAAACGAGCTCAATTCGTTCAATAAAAATGTGGACGAAGAATTACCC
G
TGAGGGAGGACCAGCATAAGGAGGCGGATGCCCTTACCGATCAAGCCG
AA
CAGAAGGCGGCCGAATTGGCCATTAAGGCCCAAGATCTGGCTGCCCAAT
A
CACGGATATGACCGCCAGTGCGGAGCCGGCCATCAAGGCCGCAACTGCC
T
ACTCGGGAATCGTTGAGGCCGTTGAAGCTGCCCAGAAACTCAGTCAGGA
T
GCAATCTCTGCGGCCGGAAATGCCACTGATAAGACAGATGGCATTGAAG
A
GAGAGCTCATCTCGCTGACACTGGATCTACTGATCTTCTCCAGAGAGCA
C
GCCAGTCTCTGCAGAAGGTACAAGACGACCTAGAGCCCCGTCTGAACGC
T
TCGGCCGGCAAGGTGCAGAAAATCTCAGCCGTGAACAATGCCACCGAAC
A
CCAGCTGAAGGATATTAACAAGCTGATTGACCAACTGCCAGCTGAGTCG
C
AGAGGGATATGTGGAAGAATTCAAATGCCAATGCCAGTGATGCTCTGGA
G
ATACTGAAGAACGTCCTAGAGATACTCGAACCTGTGAGTGTCCAAACGC
C
AAAGGAACTCGAGAAGGCACATGGCATCAATAGAGATTTGGATCTGACC
A
ATAAGGACGTTTCTCAAGCTAACAAACAATTGGATGACGTAGAAGGATC
C
GTTTCGAAGCTAAGCGAATTGGCAGAGGATATCGAGGAACAGCAGCACC
G
TGTGGGCAGTCAGAGCCGGCAGTTGGGCCAGGAAATCGAGAACTTGAA
GG
CCCAAGTGGAGGCTGCTCGCCAGTTGGCCAACAGCATCAAGGTGGGCGT
C
AATTTCAAGCCAAGCACGATCCTGGAACTGAAGACACCGGAAAAGACC
AA
GTTGCTAGCCACTCGCACCAATCTATCGACCTATTTCCGCACCACCGAGC
CATCCGGTTTCCTTTTATATCTGGGCAATGACAACAAGACCGCCCAGAA
G
AACAACGACTTTGTGGCCGTTGAGATTGTGAATGGCTATCCGATTCTTAC
CATAGATTTGGGCAATGGGCCGGAACGCATCACCAGCGATAAGTACGTG
G
CAGATGGTCGCTGGTATCAGGCTGTTGTGGATCGCATGGGTCCGAATGC
C
AAGCTAACAATTAGGGAAGAACTACCCAACGGTGACGTGGTTGAGCACA
G
CAAGTCTGGCTATCTTGAAGGATCCCAGAATATCCTTCATGTGGATAAG
A
ACAGTCGCCTATTTGTTGGTGGCTATCCGGGTATTTCGGACTTCAATGCT
CCGCCAGACTTGACCACTAACTCCTTCTCCGGCGACATTGAGGATCTAA
A
GATTGGCGATGAGAGCGTAGGATTGTGGAACTTTGTATATGGCGATGAT
A
ACGACCAGGGCGCCAGGGAGCGGGATGTGCTGCTCGAGAAGAAGAAGC
CG
GTAACTGGTCTGCGGTTCAAGGGTAATGGATACGTCCAACTGAACGCCA
C
ATCGAACTTGAAGAGCCGCTCCAGCATCCAGTTCAGCTTCAAGGCAGAC
A
AGGATACTTCCAATGGACTGCTGTTCTTCTACGGCAGGGATAAGCACTA
C
ATGAGCATTGAGATGATTGACGAGCTATCTTCTTCAACATTAGTTTGGG
TGAAGGTGGAGGCGTTCAATCCGGCAGCCAGGATCGCTACAATGACAAC
C
AATGGCACAAGGTCCAGGCGGAAAGGGAAAACCAAACGGCCTTCTCA
AG
GTCGACGATATAGTAATATCACGGACCAATGCTCCATTGGAAGCGGACT
T
GGAGTTGCCCAAGCTGAGGAGATTATACTTCGGTGGTCATCCGAGACGT
C
TGAATACCTCGATAAGTTTGCAACCCAACTTTGATGGCTGCATCGATAAT
GTTGTGATCAACCAGGGAGTGGTCGACCTTACAGAATACGTAACTGGCG
G
CGGAGTTGAGGAAGGATGCTCGGCGAAGTTCTCCACGGTGGTGTCATAT
G
CGCCGCATGAGTACGGATTCCTGAGGATGAACAACGTTTCCTCAGATAA
C
AATCTGCATGTGGTTCTGCACTTCAAGACCACGCAACCGAATGGCGTAC
T
CTTCTATGCCGCCAATCATGACCAGAGTTCCACCATTGGCCTCAGCCTAC
AAGATGGTTTGCTCAAGCTCAACAGCATGGGCAGTCAGTTGGTAATCGA
C
GATCGTATTCTGAACGATGGCGAGGATCATGTGGTTACAGTTCAGCACA
C
CCAAGGTGAACTTCGTCTTACGGTCGATGATGTAGATAACAAGAGACTT
G
GTTCTCCACAACCATTAATCCTGGAGGGTGGTGACATCTTCTTTGCTGGC
TTGCCGGACAACTATCGAACACCGAGGAACGCGTTGGCCTCTTTGGCCT
A
CTTTGTCGGTTGCATCAGCGATGTAACCGTGAACGAGGAGATCATTAAC
T
TTGCCAACAGTGCTGAGAAGAAGAATGGCAACATCAACGGTTGCCCACC
A
CATGTACTAGCCTACGAACCAAGTTTGGTGCCCAGTTACTACCCAAGTG
G
AGACAACGAGGTGGAGTCTCCGTGGTCAAACGCCGATACTCTGCCCCCA
C
TTAAGCCAGATATTGAAAGCACACTACCGCCCACAACGCCCACTACGAC
C
ACCACGACAACTACCACAACAACATCGACTACTACAACTTCAACAACGA
C
AACTACTACGACACCATCCCCGATAGTCATTGATGAGGAGAAGGAGATT
G
AGGCGAAAACACCGCAAAAGATCCTAACAACGCGGCCACCAGCCAAGC
TG
AACCTTCCCAGCGATGAGCGCTGCAAGTTGCCGGAGCAACCCAATTTCG
A
TGTTGATTTCACAGAGGCGGGTTACCGATTCTATGGACTGCGGGAGCAG
C
GCCTGCAGATTAACTCACTGCCGGTGAAGGTACGCCGTCACCATGACAT
T
GGCATCTCATTCCGTACTGAGCGACCAAACGGTCTGCTCATTTATGCCGG
AAGTAAGCAGCGCGATGACTTCATAGCCGTGTATCTTCTGGACGGTCGG
G
TGACATACGAGATACGGTGGGTGCACAGTTGCAGGCCAAGATCACTAC
C
GAGGCGGAGCTGAACGACGGCACCTGGCACACCGTGGAGGTGGTGCGG
AC
CCAACGCAAGGTATCCCTGCTCATCGACAAGTTGGAGCAGCCGGGTTCC
G
TGGATCTGAATGCGGAAAGATCCGCTCCGGTATTGGCTGTCGAGTTGCC
C
ATCTATCTGGGCGGAGTTAACAAGTTCCTGGAGTCGGAGGTTAAGAATC
T
CACCGATTTCAAGACTGAAGTACCGTACTTTAACGGCTGCCTCAAGAAC
A
TCAAGTTCGACGCTATGGATCTGGAAACACCACCGGAGGAGTTTGGAGT
G
GTTCCGTGCTCTGAGCAGGTGGAACGCGGTTTGTTCTTCAATAACCAGA
A
GGCGTTTGTAAAGATCTTTGATCACTTCGATGTGGGCACTGAGATGAAA
A
TCAGCTTCGATTTCCGACCGAGGGATCCCAACGGATTGCTCTTCTCTGTG
CACGGCAAGAACTCTTATGCCATACTCGAGCTAGTAGACAATACCTTGT
A
CTTTACCGTGAAGACCGATCTGAAGAACATTGTGTCCACCAACTATAAG
C
TGCCCAACAACGAAAGCTTCTGCGATGGCAAGACGCGCAATGTTCAGGC
C
ATCAAATCCAAGTTTGTGATCAACATAGCCGTGGATTTCATTAGCTCCAA
CCCCGGCGTGGGCAACGAAGGATCAGTGATCACAAGGACCAATCGTCCG
C
TGTTCTTGGGCGGACATGTGGCCTTCCAGAGGGCCCCGGGCATCAAGAC
C
AAGAAGTCCTTTAAGGGCTGCATCAGCAAGGTGGAGGTTAACCAAAGGA
T
GATCAACATCACGCCGAACATGGTCGTTGGCGATATTTGGCAGGGCTAT
T
GTCCCCTCAACTAATAAAGAACTTCGGAACGACTTAAGGACCTATGATT
T
ATTTGGACAACGACTACGAAAAACTGCCAGGAGAATCTTCTTTTGCCG
A
CAACTGCTAATCAAAGGACAACGAACGATCAAATTTCAAACGAACAAA
AT
CGACGGGTCATAAAAAGTCATAAGGTCTTCAAAGTAATAGATCCTTAG
C
AAAGATGCCAGTCGTATATATTCCTAGTACTATAAGCCAAACTGCGTGC
C
AATTCTATTAAAGCCATTTACATTTATATATCCTTTTTAAAACTCCTTAA
GAGAATCTTGCATTTTTGTAATTCCAATAAACCAATAAAATAAACATTTT
AATGAAAC
>LanA|FBgn0002526
MGHGVASIGALLVILAISYCQAELTPPYFNLATGRKIYATATCGQDTDGP
ELYCKLVGANTEHDHIDYSVIQGQVCDYCDPTVPERHNPPENAIDGTEAW
WQSPPLSRGMKFNEVNLTINFEQEFHVAYLFIRMGNSPRPGLWTLEKSTD
YGKTWTPWQHFSDTPADCETYFGKDTYKPITRDDDVICTEEYSKIVPLEN
GEIPVMLLNERPSSTNYFNSTVLQEWTRATNVRIRLLRTKNLLGHLMSVA
RQDPTVTRRYFYSIKDISIGGRCMCNGHADTCDVKDPKSPVRILACRCQH
HTCGIQCNECCPGFEQKKWRQNTNARPFNCEPCNCHGHSNECKYDEEVNR
KGLSLDIHGHYDGGGVCQNCQHNTVGINCKCKPKYYRPKGKHWNETDV
C
SPCQCDYFFSTGHCEEETGNCECRAAFQPPSCDSCAYGYYGYPNCRECEC
NLNGTNGYHCEAESGQQCPCKINFAGAYCKQCAEGYYGFPECKACECNKI
GSITNDCNVTTGECKCLTNFGGDNCERCKHGYFNYPTCSYCDCDNQGTES
EICNKOSGOCICREGFGGPRCDQCLPGFYNPDCKPCNCSSTGSSAITCD
NTGKCNCLNNFAGKQCTLCTAGYYSYPDCLRSVL
eIF-4Scim
>>eIF-4E|FBgn0015218|cDNA sequence
CGGCCACACTGTCTGGCCACCAAAATCCCAAACTTAATTAAAGAATTAA
A
TAATTCGAATAATAATTAAGCCCAGTAACCTACGCAGCTTGAGTGCGTA
A
CCGATATCTAGTATACATTTCGATACATCGAAATCATGGTAGTGTTGGAG
ACGGAGAAGTTTTTTGGTTAATAATACACAAGTGAAGAGCGAACTGCAG
G
GGAGCGAGATATCACGAAACAATCCAAAATCCACACACACTCAAACAG
AA
ATCAAAAGCTTCGCTCTCTCGCACACACACGCACCAACCAACTATCAAC
T
ATCACAAACACCGCGACAGAGAGAGAGCGGCAAGTGAATCACGGCGAA
TC
GAAACCGATCCGAACCCACTCCGGAGCCGAAAAAGAACTGATCCTACCA
T
CAAACGCATCCAATAAACACGGCCGCCAACATGCAGAGCGACTTTCACA
G
AATGAAGAACTTTGCCAATCCCAAGTCCATGTTCAAAACCAGCGCCCCC
A
GCACCGAGCAGGGTCGTCCGGAACCACCAACTTCGGCTGCAGCGCCCGC
C
GAGGCTAAGGATGTCAAGCCCAAGGAGGACCCACAGGAGACTGGTGAA
CC
AGCAGGCAACACTGCAACCACTACTGCTCCTGCCGGCGACGATGCTGTG
C
GCACCGAGCATTTATACAAACACCCGCTCATGAATGTCTGGACGCTGTG
G
TACCTTGAAAACGATCGGTCCAAGTCCTGGGAGGACATGCAAAACGAGA
T
CACCAGCTTCGATACCGTCGAGGACTTCTGGAGCCTATACAACCACATC
A
AGCCCCCATCAGAGATCAAGCTGGGTAGTGACTACTCGCTATTCAAGAA
G
AACATTCGTCCCATGTGGGAGGATGCAGCCAACAAACAGGGCGGTCGTT
G
GGTCATTACCCTTAACAAAAGCTCCAAGACCGATCTGGATAACCTATGG
C
TCGATGTGCTGCTCTGCCTGATTGGTGAGGCCTTCGATCACTCTGATCAG
ATCTGCGGCGCTGTTATAAACATTCGCGGCAAGAGCAACAAGATATCCA
T
CTGGACTGCCGACGGAAACAACGAGGAAGCTGCCCTTGAGATTGGTCAC
A
AGCTGCGCGATGCCCTGCGTCTGGGACGCAACAACTCGCTGCAGTATCA
G
TTGCACAAGGACACGATGGTCAAGCAGGGCTCCAACGTGAAATCGATCT
A
CACTTTGTAGGCGGCTAATAACTGGCCGCTCCTTATTCGGTCCGATCCCA
CACTGATTATTTTGTCTTTCATTTATTTATCGTTATAAGCAACAGTAGCG
ATTAATCGTGACTATTGTCTAAGACCCGCGTAACGAAACCGAAACGAA
C
CCCCTTTGTTATCAAAAATCGGCATAATATAAAATCTATCCGCTTTTTGT
AGTCACTGTCAATAATGGATTAGACGGAAAGTATATTAATAAAAACCT
A
CATTAAAACCGG
>>eIF-4E|FBgn0015218|cDNA sequence
GCCACACTGTCTGGCCACCAAAATCCCAAACTTAATTAAAGAATTAAAT
A
ATTCGAATAATAATTAAGCCCAGTAACCTACGCAGCTTGAGTGCGTAAC
C
GATATCTAGTATACATTTCGATACATCGAAATCATGGTAGTGTTGGAGAC
GGAGAAGACCAGCGCCCCCAGCACCGAGCAGGGTCGTCCGGAACCACC
AA
CTTCGGCTGCAGCGCCCGCCGAGGCTAAGGATGTCAAGCCCAAGGAGGA
C
CCACAGGAGACTGGTGAACCAGCAGGCAACACTGCAACCACTACTGCTC
C
TGCCGGCGACGATGCTGTGCGCACCGAGCATTTATACAAACACCCGCTC
A
TGAATGTCTGGACGCTGTGGTACCTTGAAAACGATCGGTCCAAGTCCTG
G
GAGGACATGCAAAACGAGATCACCAGCTTCGATACCGTCGAGGACTTCT
G
GAGCCTATACAACCACATCAAGCCCCCATCAGAGATCAAGCTGGGTAGT
G
ACTACTCGCTATTCAAGAAGAACATTCGTCCCATGTGGGAGGATGCAGC
C
AACAAACAGGGCGGTCGTTGGGTCATTACCCTTAACAAAAGCTCCAAGA
C
CGATCTGGATAACCTATGGCTCGATGTGCTGCTCTGCCTGATTGGTGAGG
CCTTCGATCACTCTGATCAGATCTGCGGCGCTGTTATAAACATTCGCGGC
AAGAGCAACAAGATATCCATCTGGACTGCCGACGGAAACAACGAGGAA
GC
TGCCCTTGAGATTGGTCACAAGCTGCGCGATGCCCTGCGTCTGGGACGC
A
ACAACTCGCTGCAGTATCAGTTGCACAAGGACACGATGGTCAAGCAGGG
C
TCCAACGTGAAATCGATCTACACTTTGTAGGCGGCTAATAACTGGCCGC
T
CCTTATTCGGTCCGATCCCACACTGATTATTTTGTCTTTCATTTATTTAT
CGTTATAAGCAACAGTAGCGATTAATCGTGACTATTGTCTAAGACCCGC
G
TAACGAAACCGAAACGGAACCCCCTTTGTTATCAAAAATCGGCATAATA
T
AAAATCTATCCGCTTTTTGTAGTCACTGTCAATAATGGATTAGACGGAAA
AGTATATTAATAAAAACCTACATTAAAACCGG
>>eIF-4E|FBgn0015218|cDNA sequence
GAACAACAAAAACAGGGTTGTTGCACAAGAGGGGAGGCGATAGTCGAG
CG
GAAAAGTGTGCAGTTGGCGTGGCTACATCATCATTGTGTTCACCGATTAT
TTTTTGCACAATTGCTTAATATTAATTTTTTTTGGTTAATAATACACAAG
TGAAGAGCGAACTGCAGGGGAGCGAGATATCACGAAACAATCCAAAAT
CC
ACACACACTCAAACAGAAATCAAAAGCTTCGCTCTCTCGCACACACACG
C
ACCAACCAACTATCAACTATCACAAACACCGCGACAGAGAGAGAGCGG
CA
AGTGAATCACGGCGAATCGAAACCGATCCGAACCCACTCCGGAGCCGA
AA
AAGAACTGATCCTACCATCAAACGCATCCAATAAACACGGCCGCCAACA
T
GCAGAGCGACTTTCACAGAATGAAGAACTTTGCCAATCCCAAGTCCATG
T
TCAAAACCAGCGCCCCCAGCACCGAGCAGGGTCGTCCGGAACCACCAAC
T
TCGGCTGCAGCGCCCGCCGAGGCTAAGGATGTCAAGCCCAAGGAGGAC
CC
ACAGGAGACTGGTGAACCAGCAGGCAACACTGCAACCACTACTGCTCCT
G
CCGGCGACGATGCTGTGCGCACCGAGCATTTATACAAACACCCGCTCAT
G
AATGTCTGGACGCTGTGGTACCTTGAAAACGATCGGTCCAAGTCCTGGG
A
GGACATGCAAAACGAGATCACCAGCTTCGATACCGTCGAGGACTTCTGG
A
GCCCTATACAACCACATCAAGCCCCCATCAGAGATCAAGCTGGGTAGTGA
C
TACTCGCTATTCAAGAAGAACATTCGTCCCATGTGGGAGGATGCAGCCA
A
CAAACAGGGCGGTCGTTGGGTCATTACCCTTAACAAAAGCTCCAAGACC
G
ATCTGGATAACCTATGGCTCGATGTGCTGCTCTGCCTGATTGGTGAGGCC
TTCGATCACTCTGATCAGATCTGCGGCGCTGTTATAAACATTCGCGGCAA
GAGCAACAAGATATCCATCTGGACTGCCGACGGAAACAACGAGGAAGC
TG
CCCTTGAGATTGGTCACAAGCTGCGCGATGCCCTGCGTCTGGGACGCAA
C
AACTCGCTGCAGTATCAGTTGCACAAGGACACGATGGTCAAGCAGGGCT
C
CAACGTGAAATCGATCTACACTTTGTAGGCGGCTAATAACTGGCGCTC
C
TTATTCGGTCCGATCCCACACTGATTATTTTGTCTTTCATTTATTTATCG
TTATAAGCAACAGTAGCGATTAATCGTGACTATTGTCTAAGACCCGCGT
A
ACGAAACCGAAACGGAACCCCCTTTGTTATCAAAAATCGGCATAATATA
A
AATCTATCCGCTTTTTGTAGTCACTGTCAATAATGGATTAGACGGAAAAG
TATATTAATAAAAACCTACATTAAAACCGG
>eIF-4E|FBgn0015218
MQSDFHRMKNFANPKSMFKTSAPSTEQGRPEPPTSAAAPAEAKDVKPKED
PQETGEPAGNTATTTAPAGDDAVRTEHLYKHPLMNVWTLWYLENDRSKS
W
EDMQNEITSFDTVEDFWSLYNHIKPPSEIKLGSDYSLFKKNIRPMWEDAA
NKQGGRWVITLNKSSKTDLDNLWLDVLLCLIGEAFDHSDQICGAVINIRG
KSNKISIWTADGNNEEAALEIGHKLRDALRLGRNNSLQYQLHKDTMVKQG
SNVKSIYTL
>eIF-4E|FBgn0015218
MVVLETEKTSAPSTEQGRPEPPTSAAAPAEAKDVKPKEDPQETGEPAGNT
ATTTAPAGDDAVRTEHLYKHPLMNVWTLWYLENDRSKSWEDMQNEITSF
D
TVEDFWSLYNHIKPPSEIKLGSDYSLFKKNIRPMWEDAANKQGGRWVITL
NKSSKTDLDNLWLDVLLCLIGEAFDHSDQICGAVINIRGKSNKISIWTAD
GNNEEAALEIGHLRDALRLGRNNSLQYQLHKDTMVKQGSNVKSIYTL
>eIF-4E|FBgn0015218
MQSDFHRMKNFANPKSMFKTSAPSTEQGRPEPPTSAAAPAEAKDVKPKED
PQETGEPAGNTATTTAPAGDDAVRTEHLYKHPLMNVWTLWYLENDRSKS
W
EDMQNEITSFDTVEDFWSLYNHIKPPSEIKLGSDYSLFKKNIRPMWEDAA
NKQGGRWVITLNKSSKTDLDNLWLDVLLCLIGEAFDHSDQICGAVINIRG
KSNKISIWTADGNNEEAALEIGHKLRDALRLGRNNSLQYQLHKDTMVKQG
SNVKSIYTL
Gap1Scim
>>Gap1|FBgn0004390|cDNA sequence
TCCGCTTCGAAAGGTTGTTCGCGGATGCGTGTAAACCCGCAAAGCAAAT
A
AACTCGGAGAACCAAGTTTTTGCGATTCTGATTCAAGCAACCGAATTAC
T
TTCCATACTTCGATAATATAATCCCACGTCTGCTAGTGCGTGCAAAAAAC
AGTTTGTAGTTAAAACGAAATACTAAAATCAGTCGAGCCCTGAAGCAAAC
C
AGCTCAATGCACAATGCAACGCTGCAGCGAGTGATGAAATTCAAATGCA
A
ATAGCCGGCTAATAAACCTGTTAAAGAAAAACAAATAATTTCGAGTTAT
T
AAAGTTTCGTGAAGATCGAGTGAAGGAGTTAGATAAATTTCCAATCGCG
T
GTTGCAAGTTCCCCAGTGGGTAGCTGACAAAAAGCTGGCTGCTTTAAGC
G
CACAATGCTGCTGAAGAAGAAGCGCTATATGTTCGACGAGCGAGACGAC
A
ATAATATTAACTCGCCCGTCGCCGTCGAGCCAAGCAGCAACAACAACAA
A
ATGGCCGATACACGCGAAGTGCGCATTGAAGAGCAATTAAAAGTGAAA
AT
TGGCGAGGCAAAGAATCTGAGCAGTCGCAATGCGGCCAACACTAGCTGC
A
GCACACAGGGCACTCGCGATGTCTACTGCACAATTGCGTTGGACCAGGA
G
GAGATCTGCCGCACACCCACCATCGAACGCACACTGACGCCGTTCTTCG
G
CGAGGAGCACCAGTTCAAGATTCCGCGCCGCTTCCGCTACCTGACCATC
T
ATCTGTGGGATCGTGATATGAAGCAGGATAAACCCATTGGCAAGATAGC
G
ATCAAGCGGGAGGAGCTGCACATGTACAATCACAAGGATCACTGGTTCT
C
ATTGAGGCCAGTCGACCAAGACTCCGAGGTTCAGGGCATGGTTAATGTG
G
AGGTGGCATTTACGGAAGCCCAACAGACCCAGTCGCTCTCCGAGGGCAT
A
GATCTGGGACAGCACACATTGCGGCATCATCAGAACCTGCCACACCACA
G
CCACCAGCAGCGGGCGCATCTAAACGATTACAAGGAGAACAGTGAACT
GA
GTAACATACAGCGGGCATCAGCAGCTGCAGCGAGTTCCTCATCGGCAGC
C
ATGACACTCAAGACACGAGCGGCCGGTCTATTTGGTCACGTGCATCATC
C
GCCATCGCAGACTCAGCACTTTCCGATCATCAATACCACATCCACGTCGT
CGGATCAGTTGTCCAATTGGAAATCGCATGGGAGATTCGTTGGTGTGAC
C
ATCAAAGTACCAGCCTGCGTGGACCTGGCCAAGAAGCAGGGCACGTGC
GC
TCCATTTGTGGTCTGTACCGCCCACTATAGCAACAAGCACCAGGTGACG
C
GACGAACTAAGCAGCGCAAAAAGACCGTGGATCCGGAGTTTGACGAGG
CC
ATGTACTTTGATCTTCACATCGATGCGGATGCGGGTAGCACAAATACCA
C
TGGAAGTAACAAGAGTGCCGGTTCCCTGGAATCATCAGCGAACAAGGGC
T
ATTCTATATACCCGGTGGGCGGTGCGGATCTGGTGGAGATTGTGGTGAG
C
GTGTGGCACGACGCACATGGAGCCATGTCCGATAAAGTGTTCCTTGGTG
A
AGTGCGGCTACCAATGCTCAATAAGCAGGAGCAGCAGGCAGTTAATCCA
T
CGGCTTGGTACTATCTACAGCCCCGCTCCATGACGCACAGTTCCCGCTCG
CTGAACGCCACGCCCCGCTCATGTGCGACGCCGCCGGGAACGAGATTAA
G
CGTGGACTCGACCATTGGATCACTGCGCTTAAATCTAAACTACACCGCC
G
ATCATGTCTTCCCGCTGGCCACATACGACGATCTTATGAATCTGCTCCTG
GAATCGGTTGATCAGCGACCCATCACCGTGTCGGCTGTGTCGATCCTAG
G
CGAGCTGGTCTCGGGCAAGACGGAGGTGGCCCAGCCGCTGGTGCGACTC
T
TTACGCACACGGAGCGCATTGCGCCGATCATCAAGGCGCTGGCTGACCA
C
GAGATCTCCCATCTGACAGATCCCACCACTATCTTCCGGGGTAACACCTT
GGTCTCTAAGATGATGGATGAGGCAATGCGATTGTCTGGACTGCACTAC
C
TACATCAGACATTGCGTCCGGTTTTGTCGCAGATCGTTGCCGAAAAGAA
A
CCATGTGAGATCGATCCCAGCAAGATTAAAGATCGCTCTGCGGTGGACA
C
GAATCTGCACAATCTGCAAGATTATGTGGAGCGGGTTTTTGAGGCAATC
A
CCAAGAGCGCTGATCGCTGTCCGAAAGTTCTGTGTCAGATCTTCCACGA
C
CTTCGCGAGTGTGCGGGTGAGCATTTCCCCAGCAATCGAGAAGTGCGCT
A
CTCCGTGGTGTCCGGCTTTATCTTCCTGCGCTTCTTTGCACCCGCTATCC
TGGGACCAAAGCTCTTCGATCTGACCACCGAGCGACTGGATGCCCAAAC
G
AGTCGCACGCTGACTCTCATCTCCAAGACGATCCAATCGCTGGGTAATCT
GGTCAGCTCCCGGTCGTCGCAACAGACTTGCAAGGAGGAGTTCACCGTC
G
AGCTGTACAAGAAGTTCTGCACGGAACAGCACGTGGATGCGGTTAAGCA
C
TTTCTGGAGGTGATCTCGACGCCCAGTCATGCGAGCAGCAGCGTTCATC
C
GGCGGCGGCGGCGGCAACGCCACTGGAACCAGTTTTACTTAAAGAGGGC
C
TGATGACCAAGTATCCGACATCCCGGAAGCGTTTTGGCCGGCAGTTCAA
A
CAACGCCACTTCCGCCTCACCACCCACTCGCTCAGCTATGCGAAGTCGA
A
GGGCAAACAACCCATCTGTGATATACCGCTCCAGGAGATCGCCAGCGTG
G
AGCAGCTGAAGGACAAGAGTTTCAAGATGCAGAACTGCTTTAAGATTGT
G
CACAACGATCGCTCGCTGATTGTGCAGACAACGAACTGCGTGGAGGAGC
G
CGAGTGGTTCGACCTGCTGCACAAGATATGTCTGATGAACTCCATCCGG
A
TGCAGTACTTCCATCCCTCGGCCTTTGTAAGTGGATTCTACAGCTGCTGC
GGCCGGTCGGATGAGAATTCACCGGGCTGTAAGAAGGTGTTGGACAAGA
G
ATCTGCAGCGCATCCACACGCTGATCATGTCTAACATGAGTGTGCTGGA
G
TCACTGCTAGATCCGCTCACCTATCACCAGTCTCTGTCGCAGACGCAACA
CCAACAGCACAATCCTCTGGTGCCGCTGGCCACCGATCTGCAGAAGCAT
T
CACCACAGGCCTTCGCTGAGTTCAAGCGAACGATTGAGAAGCTGAGAGA
G
AAGGCCTATGCCATCGATAGAGATCATCGGGACTACAAGAGGGCATTA
C
GCGGCAACTGAAATACGGCAGCAGACAGGCACCCATTGGCGATGATAA
CT
ATTGGCATATGATGCGAGCCGCCGGCCAGTTGAATCAGCAGCATCACCA
G
CAGCAGCAACATCAGCAGCAACAGCAACAGCAGCAGCAGCAGCAACTT
CA
GCAGTTCCAGCCGCAGCCAGTGCTGCCGCAATGCAGAACGTTCGGGCG
T
ATCCTTATCAGCCAGCTACGAGCAACATGAACGCCTACTGTCTGCACAA
C
ATGCAGTATCAGCAGCAGAGATTGCCGTTCCATCAGCAGCAACAGCAGC
A
CCATCAGCAGCTCCAGCAACAGCAGTCGCAGTTCCAGCCCCTGCGCAGC
C
ATCAACTGCAGCGCCACAACAACAATTTGAACAACAATAACTGCGGCAA
T
GGATCCTCCTCCAGTCCATCATCGACCACATCAAGTGTGGTGGCCGCAC
C
GCCCAGCACCACATCGTCATCGCAGCCAGCTCCACCGATTTATTAGCGTT
CAAGGCTGTGCGTATTCGCTTTGCCGCGGGCCATTATCACGACCAGGTA
A
AGGAATACGCATCGATGTGGCAAACACAACCCCCTACCGCTCCTACGCA
A
CCAGAGGATGCTGCTGTACAAAACGATTAATTGTGCTAATTTCTAGGCTC
TTGTTTTTTTTTATCATTTTTACGAGTTTAACGTTGTAAAGGTCTAGA
CTAAGTTTTTTTAATTAACAGTTTTTATACACCAGATTTTTACGGTACCG
CCTACACCAGCTACAACAACACGAGGAGAAAACAAGAGGAACGGAAAC
GA
AATCTAAATATTTATAAGCCTATTTATTTTTTTGTATGTGCTAACATTAT
TTTTACACGAAAACAAAATACCCAATATGGAAAGAGCATTTCTATACTT
G
TGTGAGCGCAAAGAGGGCAGAGAACCACTGAAAACTGATAACTTTATAA
G
CCTAAACTACTAAAAACTCAGAAACTGCTAAGATTTTTTAAAGCCTAGC
C
TAAGTTAAGTATCGGCGGGATGATGAGTAGCGAAATGAAAATGAAAAG
AT
GTAAATAGCAGATACACGAGTATATATATATCCCACAGTATGTATGTAC
A
TGTGTATGATTAACTTCATTATACCAGTTAATTTAGGCGTAGCAAAAATT
TCTAAAAAATCAACTAAACTAGGCGTTTTGCCCAGAGGCGACACAGCG
A
AAAGCAAATAATTCTAACGCAATCTGAACGCGAGAAAAATACTGCGAA
AA
GCATG
>Gap1|FBgn0004390
MLLKKKRYMFDERDDNNINSPVAVEPSSNNNKMADTREVRIEEQLKVKIG
EAKNLSSRNAANTSCSTQGTRDVYCTIALDQEEICRTPTIERTLTPFFGE
EHQFKIPRRFRYLTIYLWDRDMKQDKPIGKIAIKREELHMYNHKDHWFSL
RPVDQDSEVQGMVNVEVAFTEAQQTQSLSEGIDLGQHTLRHHQNLPHHSH
QQRAHLNDYKENSELSNIQRASAAAASSSSAAMTLKTRAAGLFGHVHHPP
SQTQHFPIINTTSTSSDQLSNWKSHGRFVGVTIKVPACVDLAKKQGTCDP
FVVCTAHYSNKHQVTRRTKQRKKTVDPEFDEAMYFDLHIDADAGSTNTTG
SNKSAGSLESSANKGYSIYPVGGADLVEIVVSVWHDAHGAMSDKVFLGEV
RLPMLNKQEQQAVNPSAWYYLQPRSMTHSSRSNATPRSCATPPGTRLSV
DSTIGSLRLNLNYTADHVFPLATYDDLMNLLLESVDQRPITVSAVSILGE
LVSGKTEVAQPLVRLFTHTERIAPIIKALADHEISHLTDPTTIFRGNTLV
SKMMDEAMRLSGLHYLHQTLRPVLSQIVAEKKPCEIDPSKIKDRSAVDTN
LHNLQDYVERVFEAITKSADRCPKVLCQIFHDLRECAGEHFPSNREVRYS
VVSGFIFLRFFAPAILGPKLFDLTTERLDAQTSRTLTLISKTIQSLGNLV
SSRSSQQTCKEEFTVELYKKFCTEQHVDAVKHFLEVISTPSHASSSVHPA
AAAATPLEPVLLKEGLMTKYPTSRKRFGRQFKQRHFRLTTHSLSYAKSKG
KQPICDIPLQEIASVEQLKDKSFKMQNCFKIVHNDSLIVQTTNCVEERE
WFDLLHKICLMNSIRMQYFHPSAFVGFYSCCGRSDENSPGCKKVLDKTM
DYFQMDLVTALDPALDLQRIHTLIMSNMSVLESLLDPLTYHQSLSQTQHQ
QHNPLVPLATDLQKHSPQAFAEFKRTIEKLREKAYAIDRDHRDYKQGITR
QLKYGSRQAPIGDDNYWHMMRAAGQLNQQHHQQQQHQQQQQQQQQQ
LQQ
FQPQPVLPQMQNVRAYPYQPATSNMNAYCLHNMQYQQQRLPFHQQQQQH
H
QQLQQQQSQFQPLRSHQLQRHNNNLNNNNCGNGSSSSPSSTSSVVAAP
STTSSSQPAPPIY
JIL-1Scim
>>JIL-1|FBgn0020412|cDNA sequence
CTACGTGCGGTTCGTGTGCTGTGTGTTGAAATTACAAATAGCCAATTATC
CGGCATTAATCGTTTTAGGGCTCTCTCGATTTTAATTGTATTATATTGTA
CTATAATACAGATATAAACCCGATTTGATCGAGTGTAACGGAAATCGAC
G
CGATTCCCATCAAGGTGGTCCGTACCTAATAAGTGTTCACGAATGAGAG
C
AAAGCAGATGGCGGAGAGCGTCCTGCGTTTCAATGTGTGTGTGCGTAAA
C
GAGTAGAAAGCGGCGGTAAAAACCTTCTCGTGTAACACAAAACAAATTA
T
ACAAAACATTCAATCTCAATATCAAAACGTTACTGTATTGTCTATTGAAA
AACAAGTACAAGCGTACGCAGGGAAATTGGAAAATCCATTGAAAATCG
AG
AGCAACAGTCGCCGGAGCGGAATCAGCGGACGAAAACAAAAACGCTTT
AA
AAACGCAGCCGATACAGAAAGTGCCAGCGTGTGAGTGTGCATATGTGTA
C
GTAGTTGTGGGCAAAGAGAACGGTAAAGAATAAGAAATCGAAAAAAAA
AA
ATAAAAAACTAACTGTGGAAGTGAAAAATGCGCGACTGATAAAGATTGT
G
ATAATCACGGCATAATATAACAAGCAAAAAAGAAGAATGAAAAGAAAC
CG
CAACCGAATTGGTTGAATAATATTTAAGCCAACGCCAGTGCTGCATAAA
T
CGGTGCACATTATCATTGGAACGTTCAGTGTTGCACATCGCTACCGCCCC
ACGCATAATCCAACACTCTTCCCCCTCCCCATCCAGATCCACCCACTCAC
ACACACACACACTCCGATTCGGATTTCTTCGTCTGCATTATAATATTGCG
CTTATAATCTTTCGCGAGATGAGTCGCTTGCAAAAGCAAAACTACGAGA
T
CTTAAGCGGTACAAGTACGTCGCGCCTCAAGAATCATCAACATCCCCGT
G
AATCGGAGTCACTAGCCTACGAGGAGCCAGATCAAATGGTGCGGAATCA
T
CTAAATGGCCAGCTGGTAGCCAATGGCAATGGCAAAACGCGAAAGAAT
AG
CAATTCCGAAACGATGACCAATGGGAAAAAGTCCAAACTGAATACGGA
GG
GATCCGGCTCTGGTTCTGGAAAGACCTTGAACTACAATAATAATAACAA
T
AACAACAACAGCATCAGTGCCACCAACGGTCAGTACACCAATAGCAGC
AG
CAAGACCACTTCAGCATCTGCAAGGGATTACACTTACCGCGAGACCATA
T
CACCGCCCACACCTCCATCCCCGCCCACCACAAATGTGGCGGATATTGT
T
TGCATATCGGATGCGGAGAGCGAGGACGGACGCGATCCCGAGCGGGAG
TA
CTACGACCAGGACATGGAGGAGGATGAGCCGAACGGGATAGAGATCGA
TG
AATCCAGCTCCAGCTTGTCCAAGGCCAAGTCCAACAATGCAGCTGCAGC
G
GCGGCGGCGGCGGCTGCAGCAGCGGCAGCAGCAGCCTCGAAGGCCTCC
TC
GTCGACCACGCCCTCCTACGCCATGCCCACCAGCAATAGTACACCCCTT
G
ATCTGGACAATGAGGCCCATCAACGGGACCTGGAGGCGGTCACCGATCT
G
AAATACTACGTAAAATTGTACAGTGATGAGGCCGTTAGTCTGAATGACT
T
CAAAATAATACGCGTTCTCGGAACAGGTGCCTATGGGCGGGTTTTCCTC
G
TTCGCAAGCTAACTAGACACGATGCCGGAAAATTGTATGCAATGAAGGT
T
CTCAATAAGATAACGGTGGTCCAGAAGCGAAAAACCGCGGAACACACC
AA
AACGGAGAGAGTGGTACTGGAGGCCATTCAACGTAATCCCTTCCTCGTG
A
GTCTACACTACGCCTTCCAATCCTCATCAAAGCTTTACCTCGTGCTAGAC
TTTGCCAATGGCGGTGAGCTCTTCACGCATCTCTACCACTCTGAGAACTT
TGAGGAGTCCCGGGTGCGTGTGTACATAGCCGAGGTGGTGCTGGCCCTG
G
AGCAACTGCATCAGTTGGGGATCATCTATCGAGATATTAAGTTGGAGAA
T
ATTTTGCTTGATGGCGAGGGGCACATTGTTCTGTCCGACTTTGGACTGTC
GAAGATCCTTACCGCGGAGAATGAATACCGTGCGCATAGCTTCTGCGGC
A
CTCTGGAGTATATGGCACCTGAGATAATCCGTACGGGGCGCCAGGACA
C
GACAGTGCCGTGGACTGGTGGTCGGTGGGTGTGCTCACTTTTGAGCTGCT
CACCGGCGCTTCGCCATCGCCACGTCCGACGGCCAGGTCCAGCAATCG
G
AAATCTCGCGGCGGATTCAGAAGGAGCAGCCAATGATTCCCTCATCGTT
C
AGTGCCAACGCCCGCGACTTTGTGCTAAAGATGTTGGAAAAGAATCCAA
A
GCGGCGCTTGGGTGGCAACCATCGCGACGCCAGCGAAATCAAGGAGCA
CC
CCTTCTTCAACGGCATTAACTGGCAGGAGTTGCGGACAAAGCGCCGCAA
A
GCCCCCTATAAGCCCACCCTCACCGCCGAGGACGATGTGCAGAACTTCA
G
CAACGAGTTTACCGACCAAGTGCCCGAGGATCCCGAGTGCGATGCTCCG
C
CCAGCCGGATACGACTATTTCGCGGTTACACATACGTGGCGCCAGAGCA
T
TTGGAGCAGATGCGAAGGGATAACCACTGTGAGATTCAATACTTTAATA
C
AGGACTTCAGAATATACCTTGTCGGCCAGATGATCTTGAATTGGGCACA
C
GCACTTCAAACGGAGCCTATGGCACATGCCATTTTGTGGTGGACAGCTC
T
ACGGATTTGGTGTTTTTGGCCAAAATAATACCGCTATCCAAGTTCCGCCC
CTCCGAGGTCGACGCGCTGATCTCGTGCGCTCTCGACACGACCAATCAC
A
AAAATATCGTAAGCTACCATGGAACGTTCAGGGAAAAGTGCGAGACATG
G
ATCGTTATGGAGTACCTGTCCGGCCCGGAGCTGACCGCATCCATTCGCAT
GGATGAGGATTCGTGTCGGGAGATCTTTCTGCAGCTGGTCATGGCTGTGC
GGCACATACACTCCAAGCACTTTATACACGGTGACCTGAAACCGGAGAA
C
ATAATGTTCGAGAACCGAGAGGATAGGACTGTCAAACTGATCGATTTTG
G
CAGCGCATGTTACAATAATCGCTTTAAGAGCTGGAAGGACAAGCCGCGC
T
ACACGCTGGACTATGCTCCGCCAGAAATGCTCGCGGATGCGAATCTCGT
T
ACTTATTCGCCAGCCGTGGATATATACGGTCTTGGGGCCACGCTGTATAC
CATGCTGGTGGGTCATCGGCCGTACAGACAGAACGAAGACGATGTGGAT
C
ATCCGCAGCGGCCCATCACGAGCTTCGAAAGCGAATGCGCCGGGGAAC
G
TTTAATCAGCGTTCTATGCGCTGGGAGAGTGCAAGTCCTGCGTTCCGACA
TTTGGTTAGCTGGTGTCTGCAGCGGGATCCGGCTGATCGGCCCACATTGT
CAGATATTCTCGACAGCGAGTGGCTGCAGTACGGCTCAAATGATCCGGA
C
GTGGATATCATTCTGCCACAACAGATGGTTGTGGACCTCAGCGAAGACA
C
TATGGAACAACCGACGGGAGGTATGTTCGACGATCAGCAACAACTGGAA
T
TCATGCACGACAAGTCGGCGGAGGATGAGGGCATAACCCTAGTCAGCG
AG
CCCATGGATACGACTGTCGCGACTCACGAGTCTAGGAGAAATGCAGCCG
C
ATTTTCGTCGGTAGTTGCTCCAACCACCGACGACGAGATAGTGCACGAA
C
GATTTGACCCGGCATTTGAGGTCCAAGCGGACTTCTACGTTTCGACGA
G
AATGCGCCGCCTCTGCCTCTGCCCGAGGAGTACTACTCCGAACTACCTCT
GCCAGAGGAGGACCGGCAGTACATACCACCTCCACCAGCACTGATTCCT
G
TTGAACCAGAAACGACCTTCCGACGGCCAAGAACACGCCAGCAGCGTCG
C
ACTGAAAGCCAGCTAGTACAACCTGTTTCCGTCGCTACGTATGAGGACA
G
CAAGGCGTCCCTGCGCGTACTAATGCAACAGCTGCCGCCGCCAGGTGAC
A
ATGTGGTAGCACGCATTCCGAAGAGAACACATCGAGTCGTACGTACATT
G
CCTCCGACCTTTGGAACCACCAAGCGAGAAGAGAATTTCTATGGATTTA
G
TAAGACAGCAATATCGTGGCGAAAGACTCGGGCCAGCTGGCGTCACTTC
T
GTCTGCTTATCAATGGTGTGCAGCAGGTGCTTAAGGTTCGGTTCAAAAA
A
GCGCGTCGCGTCTACTGCCTGCCCCATATAAAAGAGGAAAAACTTGATC
A
TGCGTACGAAAAACCGTTGACGTTCCCGCGGCCAAAGGCACAACTGAAG
C
GCACCAAGCGGGAGCCCAAGGTGCCGCGGCCACCGACTCGAGTTCAGCC
G
GAGAGGGCGCGGGCAATGCGTCAACTTTATCAGTTCCAATGACATGAGG
A
TGACGACGGCGATGATGTGGAGGTGGTGGAAATCAAGGAGGAGCCGCG
AA
AGGAGGGAGAGGAGCAACTGCGAGCGGTGCTGCAGTGGGAGGGCGACT
TC
AGGAGGCCACGGATGTACAGCTGACCACACTCATCGACGCAATGGCCCA
T
CCAGGACAATGACAACCAGACGCCGGCCAAAACAGAGGGTAAAGAACC
AG
AGGGTTTCAGTGACCCACAAGAAACCCACTAGCCCCCCTCATGAGGGGG
A
AGGATCCGCAAGACGCACCAAAGATCCTGTCAATACAGTTTTTCAAGTT
T
GTTATTCATTAGGTTAAGCTTCAGAACTCATTTCGCTTATCGTTTTTTTC
AATCACGAAAAACAAAAAGCAACTTAACGTTTACACCTTTAGAAGGACG
G
TCGGTGTATTCAATATGCAATTTGTTGTGCTAGTTAATTATTTGAATAGC
TTAAATGTAAAAAGTCAGACACAAAACGGGAATATAACAAAGGCAACT
TT
TGCATTGATCTTAGCGCGATTAAGACATACAAAAACAAATACCGACAAC
A
GAACACAACCAACTAATATGATAATAAGATTTGCAATTAGTTTAGTGCA
A
AATTATGATTAAGACAAAATTGAGAAAGATATTCTTAGGGCGCCTATAT
T
ATATACACTACACACACAGTTTGCTTTTAGTTGTGCTTTATGTTAAGTTA
TATACATTATTCTTAACACACTATCCCTGAACTAACTAAAAAAAAAAGA
A
ATACTTCCAAGCATGTATTGCCAAATGCAATATGAATTAGCTAACACATT
TAAATGTAATTGTGCTTGGCAATGTTATCTAATTGCATTCAATTAATTTC
AGTTAAAACTAAGGGGAAAAAGAAGCCTCGCCCGAAAAACCATTTCCA
CA
TGAAATTGCGAAGCTCTTCTTTGAGATCGTGTCGAAAATATAACGTTTTT
CGCACACAAAACTCAACTATTGGGGAAACGTGAATAGTCGTAGACATTT
G
TTGATGGCAAACAAAGATTTAATTGTTTTGTTAAGTATTTTTGATGTATA
TTTTTTATTTTTCTGAAAATTCTGTATCTAAATAAGATAAAGCAATGGAT
AGCGATGAAATCTAAATAAAACTTAAACAATTATATTATTTTAAACTCGC
TTGATTTGATTTGTATTGTTTTCAGTTTGTATGGCCCGCATTTGGTCAGT
TTTTAAGAGCACCCCACTTAAACCCTCCGCTGACATAAACTTTTAAACCC
TAACCCAAAATCCAATTCACATATCGAACTGTATAAAATTTGCGTTAGA
G
CTGGATAATAAAGAAGGAAACTGATTGTTGAGGTCATGGTGTAAATTTT
A
GTATAAAACAAATAACATTTATATTAAAAGTTGCCTTCTAACAAGTTGCC
TTAGAACACACACAAATGTAAAGCCCAATAACTCCAAAAGTCGCAATA
T
GAAAAGTTAAACATACCCTTTACATTTTATAAGCAAACTCATTCGGTATG
AGTTTAGTTTTTATGGGTGCGATCATTGGCAATCCGTCGTAGTTTAAGAT
CACTGGAACTATCAATGACCATAGAATCTGCCCAATCTACACTTACAAT
G
GACGCAACAACCGATGGGGGACAATTAGTTAAATGTAAGAATAAAGCA
AT
CAAATCGTATTGAACTCGATTTTTGCAGTTCGGCCAAAGCATAGTTATGT
TAACCAAACAATCGAAGGCGTTTGATTGATTAACATTGAAGATCAGTGG
A
GACGGAGGCATGGAGTTGAATATGAAACAAGTTGCTAGCGGTTAAGTCA
C
CAAAGTCTGTACATAAAAACAATATCAAAATGCAGTTAAAATAAAGCAT
T
TCAAATGATAAGCAAA
>JIL-1|FBgn0020412
MSRLQKQNYEILSGTSTSRLKNHQHPRESESLAYEEPDQMVRNHLNGQLV
ANGNGKTRKNSNSETMTNGKKSKLNTEGSGSGSGKTLNYNNNNNNNNSIS
ATNGQYTNSSSKTTSASARDYTYRETISPPTPPSPPTTNVADIVCISDAE
SEDGRDPEREYYDQDMEEDEPNGIEIDESSSSLSKAKSNNAAAAAAAAAA
AAAAAASKASSSTTPSYAMPTSNSTPLDLDNEAHQRDLEAVTDLKYYVKL
YSDEAVSLNDFKIIRVLGTGAYGRVFLVRKLTRHDAGKLYAMKVLNKITV
VQKRKTAEHTKTERVVLEAIQRNPFLVSLHYAFQSSSKLYLVLDFANGGE
LFTHLYHSENFEESRVRVYIAEVVLALEQLHQLGIIYRDIKLENILLDGE
GHIVLSDFGLSKILTAENEYRAHSFCGTLEYMAPEIIRTGPPGHDSAVDW
WSVGVLTFELLTGASPFATSDGQVQQSEISRRIQKEQPMIPSSFSANARD
FVLKMLEKNPKRRLGGNHRDASEIKEHPFFNGINWQELRTKRRKAPYKPT
LTAEDDVQNFSNEFTDQVPEDPECDAPPSRIRLFRGYTYVAPEHLEQMRR
DNHCEIQYFNTGLQNIPCRPDDLELGTRTSNGAYGTCHFVVDSSTDLVFL
AKIIPLSKFRPSEVDALISCALDTTNHKNIVSYHGTFREKCETWIVMEYL
SGPELTASIRMDEDSCREIFLQLVMAVRHIHSKHFIHGDLKPENIMFENR
EDRTVKLIDFGSACYNNRFKSWKDKPRYTLDYAPPEMLADANLVTYSPAV
DIYGLGATLYTMLVGHRPYRQNEDDVDHSAAAHHELRKRMRRGTFNQRS
M
RWESASPAFRHLVSWCLQRDPADRPTLSDILDSEWLQYGSNDPDVDIILP
QQMVVDLSEDTMEQPTGGMFDDQQQLEFMHDKSAEDEGITLVSEPMDTTV
ATHESRRNAAAFSSVVAPTTDDEIVHERFDPAFEVQADFYGFDENAPPLP
LPEEYYSELPLPEEDRQYIPPPPALIPVEPETTFRRPRTRQQRRTESQLV
QPVSVATYEDSKASLRVLMQQLPPPGDNVVARIPKRTHRVVRTLPPTFGT
TKREENFYGFSKTAISWRKTRASWRHFCLLINGVQQVLKVRFKKARRVYC
LPHIKEEKLDHAYEKPLTFPRPKAQLKRTKREPKVPRPPTRVQPERARAM
RQLYQFQ
nosScim
>>nos|FBgn0002962|cDNA sequence
CCGTACGCTTCGCAGTTGTTTCAAGTTGTCTAAGGGACATACGATTTTTT
TTGCCTCTGCGTCACGATTTTAACCCAAAAGCGAGTTTAGTTACATGTAC
ATTATTATTAGATAAAGAAGTATCGCGAATACTTCAGTTGAATAAACTGT
GCTTGGTTTTTGGGTGAGGATTTGTGGAAAGTAGAGTGCGCGATAACCG
T
AACTTTCGACCCGGATTTTCGCCATGTTCCGCAGCAACTTGGAGGGCAGT
GGCGCAGCAGCAGTAGGTGTTGCAAATCCCCCCTCGTTGGCTCAGTCTG
G
AAAGATTTTCCAATTGCAGGATAACTTTTCTGCTTTTCACGCCAGAGGAG
GGCTCAACATTCTGGGCCTGCAGGACATGTATTTGGATACCAGTGGGGC
C
AACTCGTCGGCCACTTTGAGTCCGCCCATTACGCCGGTGACCCCTGACCC
GTCGACGTCTGCGCAGTCGACGCACTTCCCTTTTCTGGCCGACAGCGCAG
CCACCGCCAATTCGCTCCTTATGCAGCGACAGTACCACTACCACTTGCTG
CTCCAGCAGCAGCAGCAACTGGCCATGGCGCAGCACCAATTGGCGCTGG
C
TGCATCAGCGGCAGCGGCTAGTGCGAGTCACCAGCAAACGGACGAGATT
G
CGCGATCCTTGAAAATCTTTGCGCAGGTGACGACGGGCGCAGCAGAAAA
T
GCGGCTGGCTCGATGCAGGATGTGATGCAGGAGTTCGCGACCAATGGCT
A
TGCCAGCGATGATCTCGGTCGCATGTCCTACGGGAGTGCTCCGCCACAG
G
TGCAAATGCCACCGCAGCAGCAGCATCAGCAACAGCAGGGGCTGCACCT
G
CCACTGGGCCGCAATCCTGCCCAGCTGCAGACCAATGGCGGCAACTTAA
T
GCCCATTCCACTCGCCACCCACTGGCTGAACAACTACCGGGAGCATCTG
A
ACAACGTGTGGCGAAACATGTCGTATATACCAGCCGCTCCCAATACAAT
G
GGTTTGCAGGCCCAAACAGCGGCCACTGTGTCCACCAATCTCGGCGTGG
G
AATGGGTCTGGGATTGCCCGTGCAGGGCGAACAGCTGCGCGGAGCTTCC
A
ATTCCAGTAACAATAATAACAACAACAACAAGGTGTACAAGCGTTACAA
C
AGCAAGGCCAAAGAGATCAGCCGCCACTGCGTCTTTTGTGAGAATAACA
A
CGAACCAGAGGCGGTTATCAATAGCCACTCAGTGCGAGATAACTTTAAC
C
GAGTGCTGTGCCCCAAACTACGCACCTACGTGTGCCCCATCTGCGGGGC
A
TCTGGGGACTCGGCGCACACGATTAAGTACTGCCCCAAGAAGCCGATCA
T
CACCATGGAGGATGCGATCAAGGCGGAATCGTTCCGCCTAGCCAAGAGC
A
GTTACTACAAGCAACAGATGAAGGTTTAG
>nos|FBgn0002962
MFRSNLEGSGAAAVGVANPPSLAQSGKIFQLQDNFSAFHARGGLNILGLQ
DMYLDTSGANSSATLSPPITPVTPDPSTSAQSTHFPFLADSAATANSLLM
QRQYHYHLLLQQQQQLAMAQHQLALAASAAAASASHQQTDEIARSLKIFA
QVTTGAAENAAGSMQDVMQEFATNGYASDDLGRMSYGSAPPQVQMPPQQ
Q
HQQQQGLHLPLGRNPAQLQTNGGNLMPIPLATHWLNNYREHLNNVWRNM
S
YIPAAPNTMGLQAQTAATVSTNLGVGMGLGLPVQGEQLRGASNSSNNNNN
NNKVYKRYNSKAKEISRHCVFCENNNEPEAVINSHSVRDNFNRVLCPKLR
TYVCPICGASGDSAHTIKYCPKKPIITMEDAIKAESFRLAKSSYYKQQMK
V

[0136] Publications

[0137] Adams et al., Requirement of yeast fimbrin for actin organization and morphogenesis in vivo. Nature, 354:404-408 (1991).

[0138] Adams et al., Pavarotti encodes a kinesin-like protein required to organize the central spindle and contractile ring for cytokinesis. Genes Dev., 12:1483-1494 (1998).

[0139] Adams et al., The genome sequence of Drosophila melanogaster. Science, 287:2185-2195 (2000).

[0140] Afshar et al., DNA binding and meiotic chromosomal localization of the Drosophila Nod kinesin-like protein. Cell, 81:129-138 (1995).

[0141] Ashburner, M., Drosophila: A laboratory handbook. Cold Spring Harbor Laboratory Press, Cold Spring Harbor, N.Y.: 421 (1989).

[0142] Ashburner, M., Drosophila: A laboratory manual. Cold Spring Harbor Laboratory Press, Cold Spring Harbor, N.Y.: 8-9 (1989).

[0143] Auld, V. J.et al., Gliotactin, a novel transmembrane protein on peripheral glia, is required to form the blood-nerve barrier in Drosophila. Cell, 81:757-767 (1995).

[0144] Bahri, S. M. et al., The Drosophila bifocal gene encodes a novel protein which colocalizes with actin and is necessary for photoreceptor morphogenesis. Mol. Cell Biol., 17:5521-5529 (1997).

[0145] Baker, B. S. et al., Genetic analysis of sex chromosomal meiotic mutants in Drosophila melanogaster. Genetics 71:255-286 (1972).

[0146] Bergstrom, D. E. et al., Regulatory autonomy and molecular characterization of the Drosophila out at first gene. Genetics, 139:1331-1346 (1995).

[0147] Bhat, M. A. et al., Chromatid segregation at anaphase requires the barren product, a novel chromosome-associated protein that interacts with topoisomerase II. Cell, 87:1103-1114 (1996).

[0148] Botstein and Shortle, Strategies and applications of in vitro mutagenesis, Science, 229:1193 (1985).

[0149] Buchowicz J. et al., Cytogenet. Cell. Genet., 86:194-203 (1999).

[0150] Cook, K. R. et al., Identification of trans-acting genes necessary for centromere function in Drosophila melanogaster using centromere-defective minichromosomes. Genetics, 145:737-747 (1997).

[0151] Creighton, T. E., Proteins-Structure and Molecular Properties, 2d Ed., W. H., Freeman and Company, New York, (1993).

[0152] Crooke E. et al., E. coli minichromosome replication: regulation of initiation at oriC, Res Microbiol., 142(2-3):127-30 (1991).

[0153] Dernburg, A. F. et al., Direct evidence of a role for heterochromatin in meiotic chromosome segregation. Cell, 86:135-146 (1996).

[0154] Deshpande, G. G. et al., Novel functions of nanos in downregulating mitosis and transcription during the development of the Drosophila germline. Cell, 99:271-281 (1999).

[0155] Dobie, K. W. et al., Centromere proteins and chromosome inheritance: a complex affair. Curr. Opin. Genet. Dev., 9:206-217 (1999).

[0156] Foe, V. E. et al., Mitosis and morphogenesis in the Drosophila embryo: Point and counterpoint. In The development of Drosophila melanogaster, edited by M. BATE and A. MARTINEZ-ARIAS. Cold Spring Harbor Laboratory Press, Cold Spring Harbor, N.Y. (1993).

[0157] Fogarty, P. et al., The Drosophila grapes gene is related to checkpoint gene chk1/rad27 and is required for late syncytial division fidelity. Curr. Biol., 7:418-426 (1997).

[0158] Garcia-Alonso, L. et al., Genetic analysis of Laminin A in Drosophila: extracellular matrix containing laminin A is required for ocellar axon pathfinding. Development, 122:2611-2621 (1996).

[0159] Gaul, U. G. et al., A putative Ras GTPase activating protein acts as a negative regulator of signaling by the Sevenless receptor tyrosine kinase. Cell, 68:1007-1019 (1992).

[0160] Gloor, G. B. et al., Type I repressors of P element mobility. Genetics, 135:81-95 (1993).

[0161] Greenfield et al., Conversion of closed circular DNA molecules to single-nicked molecules by digestion with DNAase I in the presence of ethidium bromide, Biochim. Biophys. Acta., 407:365 (1985).

[0162] Guiducci C. et al., Use of a human Invention minichromosome as a cloning and expression vector for mammalian cells, Hum Mol Genet., 8(8):1417-24 (1999).

[0163] Harrison, S. D. et al., A genetic analysis of the 63E-64A genomic region of Drosophila melanogaster: identification of mutations in a replication factor C subunit. Genetics, 139:1701-1709 (1995).

[0164] Hawley, R. S. and W. E. Theurkauf, Requiem for distributive segregation: achiasmate segregation in Drosophila females. Trends Genet., 9:310-317 (1993).

[0165] Hernandez, G. R. et al., Localization, structure and expression of the gene for translation initiation factor eIF-4E from Drosophila melanogaster. Mol. Gen. Genet., 253:624-633 (1997).

[0166] Hook, E. B., The impact of aneuploidy upon public health: mortality and morbidity associated with human chromosomal abnormalities, pp. 7-33 in Aneuploidy: Etiology & Mechanisms, edited by V. Dellarco, P. Voytek, and A. Hollaender, New York: Plenum press (1985).

[0167] Homer, M. A. et al., Ecdysteroid regulation and DNA binding properties of Drosophila nuclear hormone receptor superfamily members. Dev. Biol., 168:490-502 (1995).

[0168] Ilyin, Y. V. et al., Isolation and characterization of a new family of mobile dispersed genetic elements, mdg3, in Drosophila melanogaster. Chromosoma, 81:27-53 (1980).

[0169] Jin, Y. Y. et al., JIL-1: a novel chromosomal tandem kinase implicated in transcriptional regulation in Drosophila. Mol. Cell, 4129-135 (1999).

[0170] Kania, A. A. et al., P-element mutations affecting embryonic peripheral nervous system development in Drosophila melanogaster. Genetics, 139:1663-1678 (1995).

[0171] Kapler G M., Nuclear extrachromosomal DNA of higher plants, Acta Biochim Pol., 44(1):13-9 (1997).

[0172] Karpen, G. H. and S. A., Endow, Meiosis: Chromosome Behaviour and Spindle Dynamics, in Frontiers in Biology, edited by S. A. Endow and D. Glover. Oxford University Press (1998).

[0173] Karpen, G. H. et al., Centric heterochromatin and the efficiency of achiasmate disjunction in Drosophila female meiosis. Science, 273:118-122 (1996).

[0174] Kedes, L. H., Histone genes and histone messengers. Annu. Rev. Biochem., 48:837-870 (1979).

[0175] Le, M-H. et al., Islands of complex DNA are widespread in Drosophila centric heterochromatin. Genetics, 141:283-303 (1995).

[0176] Lee, E. C. et al., Functional analysis of the fibrinogen-related scabrous gene from Drosophila melanogaster identifies potential effector and stimulatory protein domains. Genetics, 150:663-673 (1998).

[0177] Liao, G-C. et al., Insertion site preferences of the P transposable element in Drosophila melanogaster. Proc. Natl. Acad. Sci. USA, 97:3347-3351 (2000).

[0178] Logarinho, E. and C. E. Sunkel, The Drosophila POLO kinase localises to multiple compartments of the mitotic apparatus and is required for the phosphorylation of MPM2 reactive epitopes. J. Cell Sci., 111:2897-2909 (1998).

[0179] Lopez, J. M. et al., The relationship between sister-chromatid cohesion and kinetochore formation at the centromere. in press.

[0180] Martino J. A. et al., Influence of nucleosome structure on the three-dimensional folding of idealized minichromosomes, Structure Fold Des., 7(8):1009-22 (1999).

[0181] Megraw, T. L. et al., The centrosomin protein is required for centrosome assembly and function during cleavage in Drosophila. Development, 126:2829-2839 (1999).

[0182] Meluh, P. B. et al., Cse4p is a component of the core centromere of Saccharomyces cerevisiae. Cell, 94:607-613 (1998).

[0183] Mitelman, F., Catalog of Chromosome Aberrations in Cancer, 5th Edition, New York:

[0184] Wiley (1994).

[0185] Moore, J. D. and S. A., Endow, Kinesin proteins: a phylum of motors for microtubule-based motility. Bioessays, 18:207-219 (1996).

[0186] Mossi, R. Z. et al., Replication factor C interacts with the C-terminal side of proliferating cell nuclear antigen. J. Biol. Chem., 272:1769-1776 (1997).

[0187] Murphy, T. D. and G. H., Karpen, Interactions between the nod⁺ kinesin-like gene and extracentromeric sequences are required for transmission of a Drosophila minichromosome. Cell, 81:139-148 (1995).

[0188] Murphy, T. D., and G. H. Karpen, Localization of centromere function in a Drosophila minichromosome. Cell, 82:599-609 (1995).

[0189] Nielsen, E. F. et al., Rab5 regulates motility of early endosomes on microtubules. Nature Cell Biol., 1:376-382 (1999).

[0190] Nüsslein-Volhard, C. E. et al., Mutations affecting the pattern of the larval cuticle in Drosophila melanogaster. I. Zygotic loci on the second chromosome. Roux's Arch. Dev. Biol., 193:267-282 (1984).

[0191] Pluta, A. F. et al., The centromere: hub of chromosomal activities. Science, 270:1591-1594 (1995).

[0192] Prokopenko, S. N. et al., A putative exchange factor for Rho1 GTPase is required for initiation of cytokinesis in Drosophila. Genes Dev., 13:2301-2314 (1999).

[0193] Rattan et al., Protein Synthesis: Posttranslational Modifications and Aging, Ann. N.Y. Acad. Sci., 663:48-62 (1992).

[0194] Review, Developmentally regulated processing and replication of the Tetrahymena rDNA minichromosome, Curr Opin Genet Dev., 3(5):730-5 (1993).

[0195] Rieder, C. L. et al., The vertibrate cell kinetochore and its roles during mitosis. Trends Cell Biol., 8:310-318 (1998).

[0196] Robertson, H. M. et al., A stable genomic source of P element transposase in Drosophila melanogaster. Genetics, 118:461-470 (1988).

[0197] Rørth, P., A modular misexpression screen in Drosophila detecting tissue-specific phenotypes. Proc. Natl. Acad. Sci. USA, 93:12418-12422 (1996).

[0198] Roseman, R. R. et al., A P element containing suppressor of hairy-wing binding regions has novel properties for mutagenesis in Drosophila melanogaster. Genetics, 141:1061-1074 (1995).

[0199] Salzberg, A. et al., P-element insertion alleles of essential genes on the third chromosome of Drosophila melanogaster: mutations affecting embryonic PNS development. Genetics, 147:1723-1741 (1997).

[0200] Sandler, L. D. et al., Mutants affecting meiosis in natural populations of Drosophila melanogaster. Genetics 60:525-558 (1968).

[0201] Seifter et al., Analysis for protein modifications and nonprotein cofactors, Methods in Enzymol, 182:626-646 (1990).

[0202] Sekelsky, J. J. et al., Identification of novel Drosophila meiotic genes recovered in a P-element screen. Genetics, 152:529-542 (1999).

[0203] Severin, F. F. et al., Kinetochores distinguish GTP from GDP forms of the microtubule lattice. Nature, 388:888-891 (1997).

[0204] Shirakata M. et al., Requirement of replication licensing for the dyad symmetry element-dependent replication of the Epstein-Barr virus oriP minichromosome, Virology., 263(l):42-54 (1999).

[0205] Sibon, O. C. et al., A novel histone H4 mutant defective in nuclear division and mitotic chromosome transmission. Mol. Cell Biol., 16:1017-1026 (1996).

[0206] Spradling, A. C. et al., The Berkeley Drosophila Genome Project gene disruption project: Single P-element insertions mutating 25% of vital Drosophila genes. Genetics, 153:135-177 (1999).

[0207] Spradling, A. C. et al., Gene disruptions using P transposable elements: an integral component of the Drosophila genome project. Proc. Natl. Acad. Sci. USA, 92:10824-10830 (1995).

[0208] Sun, X. J. et al., Molecular structure of a functional Drosophila centromere. Cell, 91:1007-1019 (1997).

[0209] Van den berg, D. J. and U. Francke, Roberts syndrome: a review of 100 cases and a new rating system for severity. Am. J. Med. Genet., 47:1104-1123 (1993).

[0210] Verni, F. R. et al., Genetic and molecular analysis of wings-apart-like (wap1), a gene controlling heterochromatin organization in Drosophila melanogaster. Genetics, 154:1693-1710 (2000).

[0211] Wakimoto, B. T., Beyond the nucleosome: epigenetic aspects of position-effect variegation in Drosophila. Cell, 93:321-324 (1998).

[0212] Wang, C. and R., Lehmann, Nanos is the localized posterior determinant in Drosophila. Cell, 66:637-647 (1991).

[0213] Williams, B. C. et al., Neocentromere activity of structurally acentric mini-chromosomes in Drosophila. Nature Genetics, 18:30-37 (1998).

[0214] Wold, F., Posttranslational Protein Modifications: Perspectives and Prospects, Posttranslational Covalent Modification of Proteins, 193, 1-12, B. C. Johnson, Ed., Academic Press, New York.

[0215] All publications, patents and patent applications are incorporated herein by reference. While in the foregoing specification this invention has been described in relation to certain preferred embodiments thereof, and many details have been set forth for purposes of illustration, it will be apparent to those skilled in the art that the invention is susceptible to additional embodiments and that certain of the details described herein may be varied considerably without departing from the basic principles of the invention.

What is claimed is:

1. A method to identify at least one candidate agent that modulates chromosomal inheritance in a cell comprising:
a) contacting a cell comprising a sensitized minichromosome with a candidate agent to produce a treated cell; and
b) determining if the inheritance pattern of the sensitized minichromosome in progeny of the treated cell is affected by the candidate agent.

2. The method of claim 1 comprising (c) determining if the inheritance pattern of the sensitized minichromosome in progeny of the treated cell differs from the inheritance pattern of the sensitized minichromosome in progeny of an untreated control cell.

3. The method of claim 1, wherein the sensitized minichromosome is Dp1187.

4. The method of claim 1, wherein the sensitized minichromosome is J21A.

5. The method of claim 1, wherein the sensitized minichromosome comprises a region of about 420 Kb of nucleic acid sequence from Dp1187 that confers chromosomal inheritance onto Dp1187.

6. The method of claim 1, wherein the sensitized minichromosome comprises a region of about 290 Kb of nucleic acid sequence from J21A that confers chromosomal inheritance onto J21A.

7. The method of claim 1, wherein the minichromosome comprises a detectable marker.

8. The method of claim 7, wherein the detectable marker is a gene that encodes a fluorescent polypeptide.

9. The method of claim 7, wherein the detectable marker is a gene that encodes drug resistance.

10. The method of claim 1, wherein fluorescence activated cell sorting, drug selection, fluorescent microscopy or growth rate is used to determine inheritance of the sensitized minichromosome.

11. A candidate agent identified according to claim 1.

12. A method to diagnose a patient having an indication associated with altered chromosome inheritance comprising:
a) obtaining nucleic acid from the patient; and
b) determining if the nucleic acid from the patient contains a mutation in a gene that encodes a polypeptide involved with chromosomal inheritance.

13. The method of claim 12, wherein the nucleic acid from the patient has at least 70% sequence identity to a nucleic acid sequence selected from SEQ ID NO: 1, 3, 5, 7, 9, 11, 13, 15, 17, 19, 21, 23, 25, 27, 29, 31, 33, 35, 37, 39, 41-43, 47, 49, 51, 53, 55, 57, 59, 61, 63, 65, 67, 69, 71, 73, 75, 77, 79, 81, 83, 85, 86, 89, 91, 92, 95, 97, 99, 101, 103, 105, 107, 109, 110, 113, 114, 117, 119, 121, 123, 125, 127, 129, 131, 133, 135-137, 141, 143, 145 or 147-149.

14. The method of claim 12, wherein the nucleic acid from the patient encodes a polypeptide having at least 70% sequence identity to a polypeptide sequence selected from SEQ ID NO: 2, 4, 6, 8, 10, 12, 14, 16, 18, 20, 22, 24, 26, 28, 30, 32, 34, 36, 38, 40, 44-46, 48, 50, 52, 54, 56, 58, 60, 62, 64, 66, 68, 70, 72, 74, 76, 78, 80, 82, 84, 87, 88, 90, 93, 94, 96, 98, 100, 102, 104, 106, 108, 111, 112, 115, 116, 118, 120, 122, 124, 126, 128, 130, 132, 134, 138-140, 142, 144 or 146.

15. The method of claim 12, wherein the nucleic acid from the patient encodes a polypeptide having a substantially similar function to a polypeptide encoded by a nucleic acid sequence selected from SEQ ID NO: 1, 3, 5, 7, 9, 11, 13, 15, 17, 19, 21, 23, 25, 27, 29, 31, 33, 35, 37, 39, 41-43, 47, 49, 51, 53, 55, 57, 59, 61, 63, 65, 67, 69, 71, 73, 75, 77, 79, 81, 83, 85, 86, 89, 91, 92, 95, 97, 99, 101, 103, 105, 107, 109, 110, 113, 114, 117, 119, 121, 123, 125, 127, 129, 131, 133, 135-137, 141, 143, 145 or 147-149.

16. The method of claim 12, wherein the nucleic acid from the patient encodes a polypeptide having a similar function to a polypeptide encoded by a nucleic acid sequence selected from SEQ ID NO: 1, 3, 5, 7, 9, 11, 13, 15, 17, 19, 21, 23, 25, 27,29, 31, 33, 35, 37, 39, 41-43, 47, 49, 51, 53, 55, 57, 59, 61, 63, 65, 67, 69, 71, 73, 75, 77, 79, 81, 83, 85, 86, 89, 91, 92, 95, 97, 99, 101, 103, 105, 107, 109, 110, 113, 114, 117, 119, 121, 123, 125, 127, 129, 131, 133, 135-137, 141, 143, 145 or 147-149.

17. A method for treating a patient having an indication associated with altered chromosomal inheritance comprising, administering an agent that modulates chromosomal inheritance to the patient.

18. The method of claim 17, wherein the agent is identified according to the method of claim 1.

19. The method of claim 17, wherein the agent comprises a nucleic acid sequence selected from SEQ ID NO: 1, 3, 5, 7, 9, 11, 13, 15, 17, 19, 21, 23, 25, 27, 29, 31, 33, 35, 37, 39, 41-43, 47, 49, 51, 53, 55, 57, 59, 61, 63, 65, 67, 69, 71, 73, 75, 77, 79, 81, 83, 85, 86, 89, 91, 92, 95, 97, 99, 101, 103, 105, 107, 109, 110, 113, 114, 117, 119, 121, 123, 125, 127, 129, 131, 133, 135-137, 141, 143, 145 or 147-149.

20. The method of claim 17, wherein the agent comprises a polypeptide sequence selected from SEQ ID NO: 2, 4, 6, 8, 10, 12, 14, 16, 18, 20, 22, 24, 26, 28, 30, 32, 34, 36, 38, 40, 44-46, 48, 50, 52, 54, 56, 58, 60, 62, 64, 66, 68, 70, 72, 74, 76, 78, 80, 82, 84, 87, 88, 90, 93, 94, 96, 98, 100, 102, 104, 106, 108, 111, 112, 115, 116, 118, 120, 122, 124, 126, 128, 130, 132, 134, 138-140, 142, 144 or 146.

21. The method of claim 17, wherein the agent comprises a nucleic acid sequence having at least 70% sequence identity to a nucleic acid sequence selected from SEQ ID NO: 1, 3, 5, 7, 9, 11, 13, 15, 17, 19, 21, 23, 25, 27, 29, 31, 33, 35, 37, 39, 41-43,47, 49, 51, 53, 55, 57, 59, 61, 63, 65, 67, 69, 71, 73, 75, 77, 79, 81, 83, 85, 86, 89, 91, 92, 95, 97, 99, 101, 103, 105, 107, 109, 110, 113, 114, 117, 119, 121, 123, 125, 127, 129, 131, 133, 135-137, 141, 143, 145 or 147-149.

22. The method of claim 17, wherein the agent comprises a polypeptide having at least 70% sequence identity to a polypeptide selected from SEQ ID NO: 2, 4, 6, 8, 10, 12, 14, 16, 18, 20, 22, 24, 26, 28, 30, 32, 34, 36, 38, 40, 44-46, 48, 50, 52, 54, 56, 58, 60, 62, 64, 66, 68, 70, 72, 74, 76, 78, 80, 82, 84, 87, 88, 90, 93, 94, 96, 98,100,102, 104, 106, 108, 111, 112, 115, 116, 118, 120, 122, 124, 126, 128, 130, 132, 134, 138-140, 142, 144 or 146.

23. The method of claim 17, wherein the agent comprises a nucleic acid sequence that encodes a polypeptide having a substantially similar function to a polypeptide encoded by a nucleic acid sequence selected from SEQ ID NO: 1, 3, 5, 7, 9, 11, 13, 15, 17, 19, 21, 23, 25, 27, 29, 31, 33, 35, 37, 39, 41-43, 47, 49, 51, 53, 55, 57, 59, 61, 63, 65, 67, 69, 71, 73, 75, 77, 79, 81, 83, 85, 86, 89, 91, 92, 95, 97, 99, 101, 103, 105, 107, 109, 110, 113, 114, 117, 119, 121, 123, 125, 127, 129, 131, 133, 135-137, 141, 143, 145 or 147-149.

24. The method of claim 17, wherein the indication associated with altered chromosomal inheritance is cancer, Down syndrome, cri du chat syndrome, Kleinfelter's syndrome, Tumer's syndrome or fragile X syndrome.

25. A method to identify a nucleic acid sequence involved with chromosomal inheritance comprising:
a) obtaining a test cell comprising a sensitized minichromosome, wherein the test cell has been mutagenized and has increased or decreased inheritance of the sensitized minichromosome; and
b) identifying the nucleic acid sequence that contains a mutation which produces increased or decreased inheritance.

26. The method of claim 25 comprising (c) comparing inheritance of the minichromosome in a cell that has been mutagenized to inheritance of the minichromosome in a cell that has not been mutagenized.

27. The method of claim 25, wherein the test cell is mutagenized with a chemical, ultraviolet light, radiation or a virus.

28. The method of claim 25, wherein the sensitized minichromosome is Dp1187.

29. The method of claim 25, wherein the sensitized minichromosome is J21A.

30. The method of claim 25, wherein the sensitized minichromosome is a nucleic acid construct comprising a minimal cis-acting nucleic acid sequence required for inheritance of the minichromosome.

31. A method to identify a polynucleotide involved with chromosomal inheritance comprising:
a) introducing a mutagenized polynucleotide into a cell comprising a sensitized minichromosome; and
b) determining if inheritance of the sensitized minichromosome is increased or decreased.

32. The method of claim 31 comprising (c) comparing inheritance of the sensitized minichromosome in a control cell that does not contain the mutagenized polynucleotide to inheritance of the minichromosome in a cell that contains the mutagenized polynucleotide.

33. A polynucleotide having at least 70% sequence identity to a nucleic acid sequence selected from SEQ ID NO: 1, 3, 5, 7, 9, 11, 13, 15, 17, 19, 21, 23, 25, 27, 29, 31, 33, 35, 37, 39, 41-43, 47, 49, 51, 53, 55, 57, 59, 61, 63, 65, 67, 69, 71, 73, 75, 77, 79, 81, 83, 85, 86, 89, 91, 92, 95, 97, 99, 101, 103, 105, 107, 109, 110,113, 114, 117, 119, 121, 123, 125, 127, 129, 131, 133, 135-137, 141, 143, 145 or 147-149.

34. A polypeptide having at least 70% sequence identity to an amino acid sequence selected from SEQ ID NO: 2, 4, 6, 8, 10, 12, 14, 16, 18, 20, 22, 24, 26, 28, 30, 32, 34, 36, 38, 40, 44-46, 48, 50, 52, 54, 56, 58, 60, 62, 64, 66, 68, 70, 72, 74, 76, 78, 80, 82, 84, 87, 88, 90, 93, 94, 96, 98, 100, 102, 104, 106, 108, 111, 112, 115, 116, 118, 120, 122, 124, 126, 128, 130, 132, 134, 138-140, 142, 144 or 146.

35. A polynucleotide encoding a polypeptide having a substantially similar activity to a polypeptide encoded by a nucleic acid sequence selected from SEQ ID NO: 1, 3, 5, 7, 9, 11, 13, 15, 17, 19, 21, 23, 25, 27, 29, 31, 33, 35, 37, 39, 41-43, 47, 49, 51, 53, 55, 57, 59, 61, 63, 65, 67, 69, 71, 73, 75, 77, 79, 81, 83, 85, 86, 89, 91, 92, 95, 97, 99, 101, 103, 105, 107, 109, 110, 113, 114, 117, 119,121, 123, 125, 127, 129, 131, 133, 135-137, 141, 143, 145 or 147-149.

36. A polynucleotide encoding a polypeptide having a substantially similar activity to an amino acid sequence selected from SEQ ID NO: 2, 4, 6, 8, 10, 12, 14, 16, 18, 20, 22, 24, 26, 28, 30, 32, 34, 36, 38, 40, 44-46, 48, 50, 52, 54, 56, 58, 60, 62, 64, 66, 68, 70, 72, 74, 76, 78, 80, 82, 84, 87, 88, 90, 93, 94, 96, 98, 100, 102, 104, 106, 108, 111, 112, 115, 116, 118, 120, 122, 124, 126, 128, 130, 132, 134, 138-140, 142, 144 or 146.

37. The polynucleotide of claim 33, wherein the nucleic acid sequence encodes a polypeptide involved with chromosomal inheritance.

38. The polypeptide of claim 34, wherein the polypeptide is involved with chromosomal inheritance.

39. An expression cassette comprising a nucleic acid sequence selected from SEQ ID NO: 1, 3, 5, 7, 9, 11, 13, 15, 17, 19, 21, 23, 25, 27, 29, 31, 33, 35, 37, 39, 41-43, 47, 49, 51, 53, 55, 57, 59, 61, 63, 65, 67, 69, 71, 73, 75, 77, 79, 81, 83, 85, 86, 89, 91, 92, 95, 97, 99, 101, 103, 105, 107, 109, 110, 113, 114, 117, 119,121, 123, 125, 127, 129, 131, 133, 135-137, 141, 143, 145 or 147-149.

40. An expression cassette comprising a nucleic acid sequence having at least 70% sequence identity to a nucleic acid sequence selected from SEQ ID NO: 1, 3, 5, 7, 9, 11, 13, 15, 17, 19, 21, 23, 25, 27, 29, 31, 33, 35, 37, 39, 41-43, 47, 49, 51, 53, 55, 57, 59, 61, 63, 65, 67, 69, 71, 73, 75, 77, 79, 81, 83, 85, 86, 89, 91, 92, 95, 97, 99, 101, 103, 105, 107, 109, 110, 113, 114, 117, 119, 121, 123, 125, 127, 129,131, 133, 135-137, 141, 143, 145 or 147-149.

41. A construct comprising a vector and the expression cassette of claim 40.

42. The construct of claim 41, wherein the vector is a plasmid, phagemid or virus.

43. A cell comprising a polynucleotide of claims 33, 35-38, a polypeptide of claim 34, an expression cassette of claim 39 or 40, or a construct of claim 41.

The application's sequence listing, which the Patent Office published only in electronic form, follows.

SEQUENCE LISTING (149 sequences)

SEQ ID NO: 1 - DNA, 1254 bp, Drosophila melanogaster
atgctggcagatgatgagtcgctgcagggcatcaacgattccgagtggcagctcatgggtgatgacattgacgacggcctactggacgatgtcgatgagacactgaagcccatggagaccaagtccgaggaggaagacttgcccactggcaactggttcagccagagtgtccatcgcgttcgccgttccataaaccgtttatttggttccgacgacaatcaggaacggggacgacgacaacagcgtgagcggtcgcaaaggaatcgcgatgcgattaatcggcaaaaagaactgcgccgcagacaaaaggaggaccacaaccgctggaagcaaatgcgaatggagcgacaactggagaaacagcgcttggtcaaacggaccaatcatgttgtcttcaaccgcgccaccgatcctcgcaagcgggcatcggacctttacgacgagaacgaggcatccggctatcacgaggaggatacaactctctatcgtacctacttcgtcgttaacgaaccttatgacaacgaatacagagatcgagaaagcgtacagttccagaacctgcaaaaacttctggacgatgatctgcgcaacttcttccacagcaactacgaaggtaacgatgacgaggagcaggaaattcgcagcacactggagcgcgttgaaatagagctgcccacttcggtcaacgactttggaagtaagttgcagcagcaactgaatgtctataatcgtatcgaaaacttgagcgccgctaccgatggcgtattttccttcactgaatctagtgatatcgaggaagaggcaatcgatgttacattgccccaggaagaggttgagggctctggtagcgatgactccagctgtcgtggagacgccaccttcacctgtccccggagcggaaaaaccatttgcgatgaaatgcgctgcgatagagagatccaatgtcccgatggcgaggacgaagagtactgcaactatccaaatgtttgcactgaagatcagttcaagtgcgacgataagtgtctggagctcaaaaaacgctgcgatggaagtatcgattgtctggatcagaccgacgaggctggctgcattaatgcgccagaaccagaaccagagcctgaaccagagccagagcctgaaccggaatctgaaccagaggccgaacccgaacccgaacctgagcctgagcctgagtctgaaccagaacaagaacctgaaccccaagtcccggaagccaatggtaagttctattga

SEQ ID NO: 2 - protein, 417 aa, Drosophila melanogaster
MLADDESLQGINDSEWQLMGDDIDDGLLDDVDETLKPMETKSEEEDLPTGNWFSQSVHRVRRSINRLFGSDDNQERGRRQQRERSQRNRDAINRQKELRRRQKEDHNRWKQMRMERQLEKQRLVKRTNHVVFNRATDPRKRASDLYDENEASGYHEEDTTLYRTYFVVNEPYDNEYRDRESVQFQNLQKLLDDDLRNFFHSNYEGNDDEEQEIRSTLERVEIELPTSVNDFGSKLQQQLNVYNRIENLSAATDGVFSFTESSDIEEEAIDVTLPQEEVEGSGSDDSSCRGDATFTCPRSGKTICDEMRCDREIQCPDGEDEEYCNYPNVCTEDQFKCDDKCLELKKRCDGSIDCLDQTDEAGCINAPEPEPEPEPEPEPEPESEPEAEPEPEPEPEPESEPEQEPEPQVPEANGKFY

SEQ ID NO: 3 - DNA, 1902 bp, Drosophila melanogaster
atgaccctcctgtcgaacattctcgactgcggaggctgtatttccgcccagcgcttcacccgcctgctgcgccagtccggctcatcaggaccatccccatctgcaccgacggccggaacatttgaatcaaaatccatgctggagccaacatcctcgcacagcctggcgaccggacgcgtgccactactgcacgatttcgatgcctcgacaacggaatcgccgggaacgtatgtcctcgacggtgtcgccagggtggcccaattggccctggagcccaccgtcatggacgcactgcccgattcggacacggaacaggttctcggactctactgcaattggacctgggacacattgctctgctggccacccactccggctggagtccttgcacggatgaattgtcctggcggctttcatggcgtagatacgcgcaaattcgccatccgaaagtgtgagctggatggtcgatggggcagcaggccaaatgccacggaggtgaatccgccgggatggacggactacgggccgtgttacaagccggagattatccgtctcatgcagcagatgggcagcaaggacttcgatgcctacatagacattgccaggaggactcgaaccctggagatcgtgggcctctgcctctccctgttcgcccttatagtttccctgctgatcttctgcacatttcgctcgctgcgaaacaatcgcaccaagatccacaagaatcttttcgtcgccatggtgctgcaggtgatcattcgcctgaccttgtatctcgaccaattccggcggggaaacaaggaggcggccaccaacacgagtctctctgtcattgagaacacgccctatttgtgcgaagcatcctatgtacttctggagtacgctcgtaccgccatgttcatgtggatgttcatcgagggcctttacctgcacaacatggtcaccgtggccgttttccagggcagctttcccctcaagttcttctcgcgactcggctggtgtgtgcccattctgatgaccaccgtgtgggcgagatgcacggtcatgtatatggacacctcgctgggcgaatgcttgtggaactataatctcacgccctactactggatcctcgaggggccacgactagcggtcatactgctaaacttctgtttcctggtgaacattatccgagtgctggtaatgaagctgcgtcaatcgcaggccagcgatatagaacagactcgcaaggcagttagagcggctatagtcctactaccacttttgggtataaccaatctcctgcaccagctggctcctctgaaaacggccacgaacttcgcggtctggtcgtatggcacccactttctcacctcgtttcagggattttttatagcgctaatttactgctttctaaatggcgaggttcgtgccgtgctactaaagagtctggccacccagctgtcggtgcgaggtcatccggaatgggcgccgaaaagggcatctatgtactcgggtgcttataacacggcgccggatacggatgcagtgcagcctgcaggagatccatcggccactggaaagcgaatatcaccgccgaataaaaggctgaatggaagaaagccgagcagtgccagcattgtgatgattcacgagcctcaacagcgccagcgactgatgccccggctgcaaaacaaggcgcgggaaaagggcaaggaccgggtggagaagacggatgcggaagcggagccggatccgaccatctcccacattcacagcaaggaggcgggcagcgcgagatcgcgaactcgcggctccaagtggataatgggcatctgcttccggggtcaaaaggtactaagagtaccgtcagcgtcatccgtgccacccgagtcagttgtatttgagttgtcagagcagtag

SEQ ID NO: 4 - protein, 633 aa, Drosophila melanogaster
MTLLSNILDCGGCISAQRFTRLLRQSGSSGPSPSAPTAGTFESKSMLEPTSSHSLATGRVPLLHDFDASTTESPGTYVLDGVARVAQLALEPTVMDALPDSDTEQVLGLYCNWTWDTLLCWPPTPAGVLARMNCPGGFHGVDTRKFAIRKCELDGRWGSRPNATEVNPPGWTDYGPCYKPEIIRLMQQMGSKDFDAYIDIARRTRTLEIVGLCLSLFALIVSLLIFCTFRSLRNNRTKIHKNLFVAMVLQVIIRLTLYLDQFRRGNKEAATNTSLSVIENTPYLCEASYVLLEYARTAMFMWMFIEGLYLHNMVTVAVFQGSFPLKFFSRLGWCVPILMTTVWARCTVMYMDTSLGECLWNYNLTPYYWILEGPRLAVILLNFCFLVNIIRVLVMKLRQSQASDIEQTRKAVRAAIVLLPLLGITNLLHQLAPLKTATNFAVWSYGTHFLTSFQGFFIALIYCFLNGEVRAVLLKSLATQLSVRGHPEWAPKRASMYSGAYNTAPDTDAVQPAGDPSATGKRISPPNKRLNGRKPSSASIVMIHEPQQRQRLMPRLQNKAREKGKDRVEKTDAEAEPDPTISHIHSKEAGSARSRTRGSKWIMGICFRGQKVLRVPSASSVPPESVVFELSEQ

SEQ ID NO: 5 - DNA, 1824 bp, Drosophila melanogaster
atgttgcaagccgctagcagcacaacaacagcaccagtgggaaatacagcagacacaggaaacagtgaaagcccgataatagcgacgccggaggagaaatcccaaagacgacgctccacattctatgtaccattggtaatagaagacgaagaggagaccaaaaaggatacgcccgcagatcatctggtccaaaagtcctcgagcaatacgagcctaagtagcaatagcaattccctaacgaattccgaaacaaaatcatcgaaaagctatagtctgcgcaaatcgagttcggtgaaaagcggcgtggccaaggttagtgctctcttcgagcggaaaactccatcgaaaatgtcgccaccttgcggcttcaattggagcatcagtggcagcgaaaatacggcccaatactccgataccgatgatgatgaggagaactccacggaggcacgtcatcgcgaacagctgctcaagaccctgcccagcggtaataataattccaccaccgcatccccatcgaaactgaaacgatatggcatcgtactgaacgtcatcagtttgaatggcagcgataacgagcagtcctcgttgggtagtaatggtagcagcatgccatccatgccatcaatgccaaacggccagaacataccaaatgcggctgcgcccaggactcatttcaatgaggagaacgacattgtcctggccacgcccccgccgcccaaacagcaggcactatccgccgctcatgagtctaacgactacgatgatgactcagaaataagtcgcatgcagacgaacacctcgacgcccataaagctaatgaaatcgcgatcgcgaaccaatatactagccgtaccgctgccatcggtggagcgtggtttggccacaacaaatacgacgcccaataataataatatcaatggtaatagtaatggtagtaccagcaatacgaccactacgacaacgacgacgacgttgattacgcttcgtgcaaaatcgaagaccctgccgcaaaatctatcgccctcagttgttttacgcgaggcagccgcactggatgagctcgagaagaagcgggagaagtatcaggagaagcaggagaagcgggaaaagctgcaggagaaacagcgtcagctgttcggcggcagtacggccagtcagatagcgggctcttcgccctacaaactgcagaacagctgttcggccacctcgatactaacgcacagttttccgccgaagaacctttttctacttaagtccacgcccaaactgtcaacggatatagccgcggccacgcccccaaatacatcggcaatctgttcgccgcccaagaaatcgctgagcttcattcgacgtgcccactccaccaaggtggcacgcagcaattcgctgcttaaaccaaatcaggctggaatcctaggatcgggcagtggatccaacggactcggagtccatcagggcgtcatgcagggagcattgtccatcagctgtgctggggacaattccagcaacaatggcagttggggcaaacacttctaccagccctacgatgtgtgtcccttgagtctggacgagctcaattgctatttccaggcggatcagtgcgagaaactgatctgcgaacgattcaagatcagggatctggccatacacatggcatccgcatccgcaattggagcggatctctctgtgaccacagagaatgagacaacggcaacggcggacgacgatgcgggacatcattcgggtaggtcgattcaccccccccccccaaaaaacgaaaattctttgtccctgctcaatgggcagcaagtactacatacataa

SEQ ID NO: 6 - protein, 607 aa, Drosophila melanogaster
MLQAASSTTTAPVGNTADTGNSESPIIATPEEKSQRRRSTFYVPLVIEDEEETKKDTPADHLVQKSSSNTSLSSNSNSLTNSETKSSKSYSLRKSSSVKSGVAKVSALFERKTPSKMSPPCGFNWSISGSENTAQYSDTDDDEENSTEARHREQLLKTLPSGNNNSTTASPSKLKRYGIVLNVISLNGSDNEQSSLGSNGSSMPSMPSMPNGQNIPNAAAPRTHFNEENDIVLATPPPPKQQALSAAHESNDYDDDSEISRMQTNTSTPIKLMKSRSRTNILAVPLPSVERGLATTNTTPNNNNINGNSNGSTSNTTTTTTTTTLITLRAKSKTLPQNLSPSVVLREAAALDELEKKREKYQEKQEKREKLQEKQRQLFGGSTASQIAGSSPYKLQNSCSATSILTHSFPPKNLFLLKSTPKLSTDIAAATPPNTSAICSPPKKSLSFIRRAHSTKVARSNSLLKPNQAGILGSGSGSNGLGVHQGVMQGALSISCAGDNSSNNGSWGKHFYQPYDVCPLSLDELNCYFQADQCEKLICERFKIRDLAIHMASASAIGADLSVTTENETTATADDDAGHHSGRSIHPPPPKNENSLSLLNGQQVLHT

SEQ ID NO: 7 - DNA, 834 bp, Drosophila melanogaster
aaaacgaaagctacaatgaaaaaaataattaatacatcaaagccaaagcgcaagtccacttccatgaaagtggaggagactaagctagacgaggcgcgctggggtaagccgcagacaaaggaaggtgagtctgcaaatgggatagcaaatccctcaaatgacgataaaaaggagctggccaatttcaaagccaccttcaattcctgggcccccgagaagaaacgcgagaagatgcacaaggtaggcgtcatcttaatatccaacatacccaaggacatggacggggactgcctgaaggaaatcatgaacttgcacagcgtcgtcggcagagtttacgtgcagccggaaacgctgtcaagtttcaagacaaagaagaacatgcgtaagggctgggtggagttcatttcgaaaagtggggccaaaaaaatcgctctagagctgaacaataagcctataaccgatggcaagtcgtcccgattccgtggcttgctgtggaaaatgaagttcctgccacgcttcaagtggtactatctaaccgatcgcatggactacgagctggcggtttgcaaagttcgcgtatggtcgcaggcccgcaagcgggccaccttctggtacgatcccgaccagatggagtatttcaagaagcaagtgaagaagatgaagaagatgaagaaggtcaaggaagcggagatggctaccaggaatgcggagatggctgccaagaaagcggagatggctgccaagaaattgaagaagtctgcctgagttcacgctagacctttgcttccaatgtctacctgactgcaaatatacttcaataaagtaaatcaaatc

SEQ ID NO: 8 - protein, 233 aa, Drosophila melanogaster
MKVEETKLDEARWGKPQTKEGESANGIANPSNDDKKELANFKATFNSWAPEKKREKMHKVGVILISNIPKDMDGDCLKEIMNLHSVVGRVYVQPETLSSFKTKKNMRKGWVEFISKSGAKKIALELNNKPITDGKSSRFRGLLWKMKFLPRFKWYYLTDRMDYELAVCKVRVWSQARKRATFWYDPDQMEYFKKQVKKMKKMKKVKEAEMATRNAEMAAKKAEMAAKKLKKSA

SEQ ID NO: 9 - DNA, 405 bp, Drosophila melanogaster
atgcggcccatcatcattactgttttgtccgggccacaggtgtacatcgtacaggtgcactgtcgtagcaaaaacatacctgacgtctacatcctgaccgttacccagatgctccagtacgtgaccgacccaaaggagcttcgcgatgtcagccaaattgagtcgtggaagtgcgacaagagcgtgtctgtagcccccaagccctgcaatatctggcagacgtgtgcgctgcccttcaagattcccgaacagaatctgacggatacgcgctatatggagacctgtcgggaatgccctaatgtgtatccctggctgggcgatgcaggcggtacgggaatcgcgggtcgcgataactatatctttgccggtggcgaaaatccagaggaagaagactctgcgaagtag

SEQ ID NO: 10 - protein, 134 aa, Drosophila melanogaster
MRPIIITVLSGPQVYIVQVHCRSKNIPDVYILTVTQMLQYVTDPKELRDVSQIESWKCDKSVSVAPKPCNIWQTCALPFKIPEQNLTDTRYMETCRECPNVYPWLGDAGGTGIAGRDNYIFAGGENPEEEDSAK

SEQ ID NO: 11 - DNA, 889 bp, Drosophila melanogaster
tcgaatcgagcgtgaaaacgtgcaataaaaccaaagttaacaaaaacaaaaaaaaaaaaaccagactacttaatgtcccagatgggcggcacatgcttgtacgatgagcccgaaatcatggaggagttcatcagctgttatcagtatttcaccgccctgtgggacagcagcagtcccgattatctatcgaaacagaaaaaggagcccggctatcaggagctattgaagatactgcgacgcgttaatagcaactgttcgattcaggatgttaagcgaaagataaactcgctgcgttgctgctatcgtcgtgaattcaaaaaggtacaggaatcggtcaatggctaccagacgcgtctctggtggtttcatctgatggatttcctcaagccggtactcaacatacaatcgccggccagggtgaaatccgagaacgtggacgatagtctcgacgagaccagcattcaggatgttgacattatgtctgatgcctttccacacgaagaggatatgctacgtcttgatgccgtgggtgatggcgatgttgaaccggaacccgagcctgataacgatcccgaattggataacatggatgatcatgttgatgattatcgtaacaattcatcggctgggagcattaagaacaatggctatcagcagcacaccgtatcttcgcaccagcagcataacggtgaatcgcagacttcggataaatccggacgtcgcatccgtaaccgacgaagacgcagtagcaatgacaccgattacgttgaagcggcgagaaagcgtagaaatgtggagacttcgaatagagatagagactggcatagagagcgggatagggagcgagacagaaagcatgaaagcgacagcgagtacgagtgcgagctga

SEQ ID NO: 12 - protein, 257 aa, Drosophila melanogaster
MEEFISCYQYFTALWDSSSPDYLSKQKKEPGYQELLKILRRVNSNCSIQDVKRKINSLRCCYRREFKKVQESVNGYQTRLWWFHLMDFLKPVLNIQSPARVKSENVDDSLDETSIQDVDIMSDAFPHEEDMLRLDAVGDGDVEPEPEPDNDPELDNMDDHVDDYRNNSSAGSIKNNGYQQHTVSSHQQHNGESQTSDKSGRRIRNRRRRSSNDTDYVEAARKRRNVETSNRDRDWHRERDRERDRKHESDSEYECEL

SEQ ID NO: 13 - DNA, 1039 bp, Drosophila melanogaster
gcaagcacatatctaaatctagctcgaaaccagatggatgctcatcttgcacactgtcaccagtgttggtaaccgagtgcattgtgagcggaacgttccgacacctactttgtttatttattgttattaattaggaagcatgcccctcgtggtgattacgggcctgccagccagcggaaagagcacacgtgcccgccagctacgggatcatttcgtggagcgcggcaggaaggtgcatctaatcagcgaaaacgaggcagtgcccaaggcgggttttggaaagaattcccatacaggtgattcgcagaaggagaaggtggtacgtagcgatcttaagtcggaagcctcgcgtcaccttaaccaggaggatctggtcatcttggacgccgggaactacatcaaaggctaccgctacgaattgtactgcatgtccaaggtgtcaaggaccacccagtgcactgtgtttacctgcataccccaggaggaggcgtggacctttaatagccaaagaacggcgccggatgaactgcctggcgacagtgaaagagttcagccggtggacaactcggatgttccctacaccagagagacttttgatgctctgtgccagcgctacgaggagccgcagagcaacaaccgttgggacagtccgctggtggtagtcttgcccaaggacacgctcgacatggaggccatctacaaggccttgtacgagtcccagccactgccacccaaccagagtacttataatgcaccgctgggaacaaccaactacctgttcgaactggacaaaatcgtgcaggcgatcatcaaggagatcctcggcgccgtcaagatcaaggccttcggccagctgcgcatcccagggagcagaaatcccgtgaaggtcgccacttcgatgaatgccctccagctgaaccgcctgcgccagaagttcatcacgagcacgtgccacgccagccagacgtcacccactccgctggagcaggtgccgcacttgttcgtgcagttcatcaatgccaacacgatcggctgctag

SEQ ID NO: 14 - protein, 299 aa, Drosophila melanogaster
MPLVVITGLPASGKSTRARQLRDHFVERGRKVHLISENEAVPKAGFGKNSHTGDSQKEKVVRSDLKSEASRHLNQEDLVILDAGNYIKGYRYELYCMSKVSRTTQCTVFTCIPQEEAWTFNSQRTAPDELPGDSERVQPVDNSDVPYTRETFDALCQRYEEPQSNNRWDSPLVVVLPKDTLDMEAIYKALYESQPLPPNQSTYNAPLGTTNYLFELDKIVQAIIKEILGAVKIKAFGQLRIPGSRNPVKVATSMNALQLNRLRQKFITSTCHASQTSPTPLEQVPHLFVQFINANTIGC

SEQ ID NO: 15 - DNA, 1608 bp, Drosophila melanogaster
atgatacctattctggagaaactcagcgggttctacaacacctacgtcttggccgtactcaccattggttatatcctgggcgaattgggtcactatctgatcggagtgacctccaagcagacggccattgagttggactacggtgatcatgcctgccagcagaacacctcgatgttcaatcgccacgagttgcccacccagtgctcggcggttatgaatgagaccagctgctatgcccttgatttcaacggcactggctattgcgagtggaactacaatggactgggcatcgactaccagatcctggccggacccaccttcatcctgattttcaccatcgccggcgtatttatgggcttcgcagcggacaagtacaatcgcgtcaacatgctgactgtgtgcacagtgatcttcggcattgccatgattctgcagggcaccgttaaggaatactggcagctggtaattttgcgtatgatcatggcagccggcgagtcgggttgcaatcccttggccacgggcattatgtccgatatctttccggaggataagagagcactagtcatggccatcttcaactggggaatttatggaggatatggaatcgccttccccgtgggtcgctacatcaccaagctgaatttctggaatctgggatggcgcgtttgctacttgggcgccggtgtccttaccgtaattatggccgcactgaccggaaccactttgcgggagccggagcgcaaggccatcggtgagggtgaccgccagacgtctagcggcaaaccagtgagcctgtggcaagttatcaagaatccggcaatgatcatgttgatgattgccgcgtccatccgtcactgcggtggcatgacctttgcctacaacgccgatctctactacaacacgtacttccccgacgtggacttgggctggtggctctttggggtcaccattggcattggcagcgtgggtgtggtcgtcggtggcattgtgtcggacaagattgtcgccaagatgggcattcgatcacgcgcctttgtattggctgttagccagctaattgccacactaccagccttcggatcggtctactttgacccgctgtgggccatgatcacgctgggcctgagttatttcttcgccgagatgtggttcggtattgtctttgccattgttgtggagattgttccgctgcgcgttcgctcctcgaccattggcgtctttctgtttgtgatgaacaacattggcggcaacctgcccatcctggtggatccggtggccaagatcctgggctatcgcggttcgatcatgatcttctacgctggattctacggcatcagttctattctcttcttcatcacctgtttcctgctggaaggcaagcctgatgaggtgggacagccggagtcgccgaagagccatccggatgccgtgctcaatgctcgccacatgcacggacacgacaactccgtgttctccgtggacgagaccttgccctccaacggacgtcctgcccaacttccgcagcatctgcagatgtccagcaatggatacgacaagtcccagatttctccgccacgacaaaatggcgcggagagcagtagactatag

SEQ ID NO: 16 - protein, 535 aa, Drosophila melanogaster
MIPILEKLSGFYNTYVLAVLTIGYILGELGHYLIGVTSKQTAIELDYGDHACQQNTSMFNRHELPTQCSAVMNETSCYALDFNGTGYCEWNYNGLGIDYQILAGPTFILIFTIAGVFMGFAADKYNRVNMLTVCTVIFGIAMILQGTVKEYWQLVILRMIMAAGESGCNPLATGIMSDIFPEDKRALVMAIFNWGIYGGYGIAFPVGRYITKLNFWNLGWRVCYLGAGVLTVIMAALTGTTLREPERKAIGEGDRQTSSGKPVSLWQVIKNPAMIMLMIAASIRHCGGMTFAYNADLYYNTYFPDVDLGWWLFGVTIGIGSVGVVVGGIVSDKIVAKMGIRSRAFVLAVSQLIATLPAFGSVYFDPLWAMITLGLSYFFAEMWFGIVFAIVVEIVPLRVRSSTIGVFLFVMNNIGGNLPILVDPVAKILGYRGSIMIFYAGFYGISSILFFITCFLLEGKPDEVGQPESPKSHPDAVLNARHMHGHDNSVFSVDETLPSNGRPAQLPQHLQMSSNGYDKSQISPPRQNGAESSRL

SEQ ID NO: 17 - DNA, 9204 bp, Drosophila melanogaster
atggaggatagcgaggacgacgtggtggtggtgagctgcgatacctcgatgaaggagaaggtaaaggccaagctggtggagatccgtaagtttgtgccctttatccggcgtgtgcgaatagacttccaggatactttgtccaaggttcagggtcatcgtctggatgccctggttaacctgctggatcgcgaggacgtatcgatgagctctcttaacaagatcgaggtgatcattgataagctaaggacgcgcttcaatccgaggatcgaaattgacactggcgaaatcattgatatcactgaaaacactgacgccaaggcatcggatgaggggcagcggtcacctgcagaaccacgtgccgcccttcaagctatagttcaagatacgaaaacaccaaccattccagaaccaacatcaccagcggcgcttaagcattcctcccttcgtggcagtcgtggatttctggctgtcatgcagaaggccttaattgaagagaagaagcagcgagctagcgaacagaaaactgataaagaaactaacggtgtaacgcagctagagacaaacttctcgcggcgatcttatacaacatcgtcacagtcaacctgccgttcttcagaaatatcggtaagagcagaaaacccagattttaagcgacgaagcacatcgcttgtgcagcatgctcctctacaggaggcctccccagggcaatccaaaaaagacttgcccatatccttgtcggtacagggtctaccagctttggtcagtgccagcactgcaagtccagcaaatacgcttgaggaggcccgcaagaagctggcggccttgaaatatggactaggaacaacggtaccaagcatgcctccactggcctccaatataaatgatccacgcggtagaaaaggaataaacctgcctgaaactaacaacaataaagacaacgacttgggtatagcgctgcaatccccgccgcctatgcggactccctcgcctattccgccgccaccaaggatgaaggccggtacgtgggcctcattttcaaatgttccccaggaaagcgcatttacaggccagcatgctgtgcagcgcaactcggtacctccgggagattctcgagcctttggggatgctttggcacatgaaccaaggtccttctatggcactgattcccgagaaccccgagaccctcgtatctggaagagcaagacttcccaacagcagcaacatcagcaggcgccacaggcacaaattcctccgtattccagtgacccgcgtcgttctataagcacttacagcggtttcgaagagggcggatttcgcggcggtcacaacaaacggggctttggacgacacaatgacgtgccacgcacatatggggaacaccgcaaagccaaggcccgtgctgaggcggaggccaaggctaaggctgaggcggaggccaaggctaaggctgcggcggaggccaaggctaaggctgcggcggaggtacgccaattagaaacggaagtttcgcgggagatggaagcccaagaaaaaaataaacagcaaaaggaaaagccggaggagagcgaggcggagaagtcgacgatcgcagtgactcaggttccggaattggacacctcctaccgcaacgttaatctgggggtgctaaacaagaagctagactttcgaataccgaagaaaaccctcccaccggcaacaacaataacctcaacaagtccagtcaatggtaatggggagaatccaagctgcccctcaaattcccccacaagcaaaagctgtgatgccaaccaggacaaagatacttataagaataaagataggtatttaaataaggctaaggctaaagacaaggtagataagggcaatgaggtgtcggagaacaatctggataagtctgagaagcttgaaaaatcgcaggataagaaggcaaatgacaaggagaacaagtccgacaaaaaggagaagaagagactgaacagggagcctgaaaagaaatcaaaggttgagaaccccctcgagattgtggactcgaatagcgtggtcagtgaggaaagctcggaaaatacagacaatgtggaaaatgaaccgcctcttagcgagactaacgcgtctccagttccagagctagctaccagcactcaggacagtcaacaggaccagtcagtgagtgaagagttggacatccttgccaaaaaccgtagaatgtccggaactagaataaagactcccatttcgtctactggaaaccctgcactaaagcgacgggcagatgatgatgttgaggacaagttggaaaatccgactaaaaagaactgcgcaaagtgggaggcaaagcctgacaaggaaaaatcggaggatgataccatcgacaagattaaatccatgaaagtaactaaattcgctgatgtcgagatgaaggttacagaagaaagccagagtgctgaggaggaggagattactgagcagaaagagagtactgaggaggaggaaggtactgagcataaaaagagtactgaagagaaggataagccgccaaaaatctccaagataaaaattgtccttactcccattgcccatacaacacaagtggttcgtcctaatgatggcttcaagaacaatcaagaaaagatcttggacaacatggcaactgatgagcacgatgatgaggaggtccccgggcccccagctcaattcctacgccggattatgcagcgtcggaactccttggctcctacgtatatgaagccgatggtggacaaggataagattgcttcttccagttttacctacgaggatctgccggagcagaagcgcggaaatcagaacgcccgaaacctggccatcattttcgaaaaaactagtgacaactgcagcgtgtccactcaaaacattattaatggcaaacgtcgcactcgtggatgtgagacctcttttaacgagacccaattgagccgaaacatctttggcatgggccagataaacaggtcgcggccaaaggccacccgagggcaagctattcacaaggaaacagaggatgatgtggagatgaagcctaagaaggctcgattggaagcacaggagataaatggggtcagtgttacgcctgatgaacagcaggtagagaacaacgtggaagtcacccaaaaggaggtggaagcaatatcctcagagccacttctctcttctgaggttgaaccgacacgaaagcctcgcacgaaaccgcgaaaaaacgagctggacaagctaaacgacgacattgcgcaaatgtattacggggaggaagtgatgcgtgccaccagtcgcagggcttgtacccgtcgatcgcgcacgtcctcgcacacgcgcaccagtagccagcattccaggacgtcctctgtatcgcgaaccgatagcatatccaccgtatcggatattagttccataatcgtcaggaacacggcgcgaaggggtagaggcatcagatcatccgaaaatggcatcaaccgtgccacgtttaatgcatccttgaatgcaaaaaaaccaaagttgtgccgtgttagaataaagcgatgtgctgcattgatggagatgataaaggaccaggaaaaggaggaacaggagaagaaggagcagaagaataaagaaccgaagaagaagaaagtgggtgtgcaaaaaaagccattgaaaagtaagccgaaaagagagaatagcgttattcttaacacaaatcccgaatggcactccatttcgaaggctgttatcaagtgtgtcgtctgctcgaagtgggttcgcaggagcccactctctcattatatgatgtgccataaggagcactatgccgcccgattgccacccgatgtgcttaaagagctgcgggccgggcgcggaaatcgaccggattactgggtttcgcaacgcggcggctacacattgcacttcacttgcccgttctgccagaagccactgctactctgccaaaaaggcatgatcgagcacttgatcggccatatgggcgagtctcgtttttactgctccaactgtaatatgccacagaaccgcctcagtaggctgctggaccacaccgcatcctgtgggccaggtgcgaagcctttaagtagcaaaaccgtctgcctaccgatgagtgttcacgtgtgccacatctgccagtttatgcagtacagcaaggaaaatatggaccggcatcttactgttcagcatggcctaacgaaggaggaactagaaagtgtggagcgcgaggagttgatgctctgcgacacaacagacgtaccatatgcagattcgaataaggatggcagcgcccgagaaagagaagagcaggatgaccagaacatgacccaggctaacgaagggtcggaagtgccggaaataccgccgcctccgccagaaattgagcccttgtttgtggtcaatgagtgtctaatgacctctgaaatggacacggacatggaagaagtcttggaacagcccgttcaacatatgagcttaatggtagacgaaaagcctgtgacgctactcagtggggccacagaacagctggagcctagtgtccctgatcccgagcctgttgttccatctgcacaagatgatggcaaagatgtaaatgaagatgaagacgtagacgtggaggcagtagtggattcccttcagtcacacactgaccagacggctacttctatgttagcagaagtcagtctagccgaattggctggggatgtacttgatggtattggcagcgacgcgtccgactatgagatggatgataattcagagcaagtggatacaactaacaaaaacggctacggtgatgatgacgatgatgcgcttaccgacgattgggtggatctggagactgccaagcgcaattccaagtccgccaagagcatttttagagtgttcaatcgcttctgctcgcgtttaaacaaattaccccgatccagcagagcagtgccctcgaatgggagtgaaaacagcgatggcagcgacaacaacgacgacgacggcgataatcctgatcccagcgagctaatgccaacaatgcaaccattggagccggagccagagatgggggattcatccacatctacaggtgctaagtcgctatccgaacgggtggagaatgtgggctttcaaaagccctcttcagacgaggatcaaaatcgcgtggcagcatcctattactgcgtgcagccgggttgcactttcctcttttccaatgagctggaaggcctcgagaatcattttgcgttagagcaccctcttgttcgatggagcggcaaatgtggcatgtgccgtcagaaaatcacggcaacggaaacgaatctcagaatttctgaagagttgcgccacatgagggacgtgcacatgaaggacatatccaccctgcctcctcctcagtcatctgcggttgaaagcccagccgttattgaatcctgcctgaatcagcgtgaaccagtacctgaatcagaacctgatcccgttcctgagcttcccaagctgcgtgttcgacgcttcactggggatcgccttgttgtggattcacaagcggaaaagagccaaccggtagcaatagttgtcagtgatgatgataatccgcgaaatgggatgctaagggacttgctggcggcggatccacggccacccaatcagcagttggacctccaagccgctggactgggcgagttcctttgcgccaagcccgattcaccgtcaacagaaccggtcaagcagacgcccgtaattgttggctattcgagtggcttgggcttgaaaatcggccaggtccttagcagaactcagatttcagctaactcacggctatcgccagtcgttaacgatcccctgccagagaagtcttctgctcctgctgccgttgaagagaatcgtaatcgattcaggtgcatggccaccaactgcaattttgttgctcacaagctcatgttcatgcgggagcacatgaagtttcacagctacagtttcagcagcaccggtcacctgaactgcgcgtactgctcccatgtggcagtcgatgtggatgattacttgcgccacggagtgatcattcacgacctggcaccacgctccgaactggagagttcaactggaccaccatctgttacccagaaaatccgggatatgctcagccagcgggaaaatggtcgtgttccaccaccaactcctcaagtcactctgtctgatgtggtcctgggtcttttagaatgcaccggatacagcgaggataaactgtacgcctgtccccaaaagggctgcatcgtgcggctgacagatgagcagcttgtaaaccatttgcgctaccacattcgtagcactcatcagggcagcgagttggtgaaatgcaagttttgcaccaaggcgatgcatccgccggcacttcgtacgcatctgcagcagtaccacgcccggcacagcatcttctgcggcatttgcttagccacatcggtcaaccagcgcataatgatgtatcacatgagcacggtgcactccaaggcctacggccggcctaacgcgcggctggcgtttgtgtcactgcccgtgaagatcgacgcgagtaagaagaacgtagaaagcgagttctacgtggccgtcgtggaacagccctttggcaacctccagatgcaggatttccagcgcaagctgttcgatgaaatggaccgtcggcgttcgggaacaaagacgtacttccgcagctccgaggtgcatatcctgccaacgcagccaacattccagcgaccgctatactgtacggagtgccccttctccaccacgtcaagggttaacatgcagatgcacctctatgagcacaaggatgagaccattcgggaagcctccaaattggcggacttgatagttccagcaacctcttcggtattaactgtttcggcgagtacgttggtggcaccgccgaggccaggcaaagattcagaaaaaccatctacttccggacaaagtggtgatgcagcgacggagcagctgaatccagatgttcctggaacccacaagcccatcaagccaccgttacgctatgtgcccccggaccaacgctaccgctgtggcttcctccgatgtagcgtcctttgtttttcggaatctgcggtgcgcaaacacatgcaggctaaccacaaatactcggaggtggtaaggtgcccgcactgcaagaactgccagggtcagtttggagtagataagtactttgaccatcttgcaatgcataagcggcacatcttccaatgcggcgcttgctcacgtcacaatagcaggcgtgtcatcgagcggcacatacaggaacgtcacaatattcaagatgtggacatgatcgtacaccgccataatgacagcaacaaaacgaccgaagcccgctggctgaaggcgcctaaattggcacgtcattcgctaatggagtacacgtgtaacctgtgcctcaagtactttccaacgaccgtgcagatcatggcccatgcggcgtccgttcacaaacgcaactaccagtaccactgtccgtactgtgaatttggtggaaacctcgccaccgcgctcattgaacacatccttcgcgagcacccggaaagggaagtgcagcctgtgcaaatctaccagcgcatcgtgtgtaagaacaagcagacgctaggcttctactgcaccacctgtcacgaggtggccagcagcttccagaagatcgctatgcactgcgacaaggagcataagtcgcgcaatccggtgcaatgtccccactgcattttcgggcatttggccgaacgccaggttgtcttacacatacaagagaagcatccccatgaacgcggactggcaatggtgcagttcgaacgcgtgcttaatgacatcccgaacagcataagctgggagataggtcggcccatcgaagtggagcctgagaaggagatcccgaacaatggggagagtgcattcctgccgctaagccagagacaggttgtaacggaagtggtggacctgctggattcagacgacgaggcggacgagtacggtgaacaagatgacgcgaaaatcgtggagttcgcctgcacacactgcgacgggacaaacaccaacttgccggacctacgctcccagcactgggcccgcgaacatcccgaccagcccttctatttccgcgttcagccgatgctgctctgctccgagtgcaagagatttaggggcaatgcaaaggcacttcgcgagcacctgcgtgcgacacactctatccggagcatagtggctgcggacattcgtcgaccgatggagtgcgcttactgcgactaccgctataaaaacaggcacgatcttgcgaaacacatcagtgagataggtcacctgcccaatgacctgaagcacgtaacagatgatgaaattgatgccctgatgctgctcagtgccagtggaagtggtggggctgttaacgaatactaccagtgcggattgtgcagtgtggttatgccaacgaaggagacaattgtccagcacggccaagtggaacactgcaagcccgacgagcgtttctgcttccggcagctagtgtcgccagtgatataccattgttccttctgcatgttcaactcgaccgatgagctgactacgctgcgccatatggtggaccactacagccgcttcctggtctgccatttctgcacacgctctcagccgggtggtttcgatgagtacatccagcactgctatacctaccaccgggacgatatcaaatccttccgggacgtgcacacgtttagcgatctgaagaggtaccttagtcaggtgcattaccaattccagaatgggttgattatcacaaaaagcagtctccgttatacacgttacaaatccgacaaatgtatgcttgagctagacgctgagctaatggccaaggcccagcggccacccattccgcgtctgcatatcagactcaagtcgaccggcgttcagatgcagagccccgagggggctgatgtggagaaacctgtgtcgttgttgcggatcacaaagcgacgaaaaacgcttaatcctggcgaattgctccgctcattccgcgaggagaatgaggtacagccacagccaccggcctcttcaacatcgtcggggacggctccttctcctgcggcaggttctgtgttcaacctgttcaagcgccgcaacagtctcgttgtccgcccagcaaccagcaacttggatcaacactaa

SEQ ID NO: 18 - protein, 3067 aa, Drosophila melanogaster
MEDSEDDVVVVSCDTSMKEKVKAKLVEIRKFVPFIRRVRIDFQDTLSKVQGHRLDALVNLLDREDVSMSSLNKIEVIIDKLRTRFNPRIEIDTGEIIDITENTDAKASDEGQRSPAEPRAALQAIVQDTKTPTIPEPTSPAALKHSSLRGSRGFLAVMQKALIEEKKQRASEQKTDKETNGVTQLETNFSRRSYTTSSQSTCRSSEISVRAENPDFKRRSTSLVQHAPLQEASPGQSKKDLPISLSVQGLPALVSASTASPANTLEEARKKLAALKYGLGTTVPSMPPLASNINDPRGRKGINLPETNNNKDNDLGIALQSPPPMRTPSPIPPPPRMKAGTWASFSNVPQESAFTGQHAVQRNSVPPGDSRAFGDALAHEPRSFYGTDSREPRDPRIWKSKTSQQQQHQQAPQAQIPPYSSDPRRSISTYSGFEEGGFRGGHNKRGFGRHNDVPRTYGEHRKAKARAEAEAKAKAEAEAKAKAAAEAKAKAAAEVRQLETEVSREMEAQEKNKQQKEKPEESEAEKSTIAVTQVPELDTSYRNVNLGVLNKKLDFRIPKKTLPPATTITSTSPVNGNGENPSCPSNSPTSKSCDANQDKDTYKNKDRYLNKAKAKDKVDKGNEVSENNLDKSEKLEKSQDKKANDKENKSDKKEKKRLNREPEKKSKVENPLEIVDSNSVVSEESSENTDNVENEPPLSETNASPVPELATSTQDSQQDQSVSEELDILAKNRRMSGTRIKTPISSTGNPALKRRADDDVEDKLENPTKKNCAKWEAKPDKEKSEDDTIDKIKSMKVTKFADVEMKVTEESQSAEEEEITEQKESTEEEEGTEHKKSTEEKDKPPKISKIKIVLTPIAHTTQVVRPNDGFKNNQEKILDNMATDEHDDEEVPGPPAQFLRRIMQRRNSLAPTYMKPMVDKDKIASSSFTYEDLPEQKRGNQNARNLAIIFEKTSDNCSVSTQNIINGKRRTRGCETSFNETQLSRNIFGMGQINRSRPKATRGQAIHKETEDDVEMKPKKARLEAQEINGVSVTPDEQQVENNVEVTQKEVEAISSEPLLSSEVEPTRKPRTKPRKNELDKLNDDIAQMYYGEEVMRATSRRACTRRSRTSSHTRTSSQHSRTSSVSRTDSISTVSDISSIIVRNTARRGRGIRSSENGINRATFNASLNAKKPKLCRVRIKRCAALMEMIKDQEKEEQEKKEQKNKEPKKKKVGVQKKPLKSKPKRENSVILNTNPEWHSISKAVIKCVVCSKWVRRSPLSHYMMCHKEHYAARLPPDVLKELRAGRGNRPDYWVSQRGGYTLHFTCPFCQKPLLLCQKGMIEHLIGHMGESRFYCSNCNMPQNRLSRLLDHTASCGPGAKPLSSKTVCLPMSVHVCHICQFMQYSKENMDRHLTVQHGLTKEELESVEREELMLCDTTDVPYADSNKDGSAREREEQDDQNMTQANEGSEVPEIPPPPPEIEPLFVVNECLMTSEMDTDMEEVLEQPVQHMSLMVDEKPVTLLSGATEQLEPSVPDPEPVVPSAQDDGKDVNEDEDVDVEAVVDSLQSHTDQTATSMLAEVSLAELAGDVLDGIGSDASDYEMDDNSEQVDTTNKNGYGDDDDDALTDDWVDLETAKRNSKSAKSIFRVFNRFCSRLNKLPRSSRAVPSNGSENSDGSDNNDDDGDNPDPSELMPTMQPLEPEPEMGDSSTSTGAKSLSERVENVGFQKPSSDEDQNRVAASYYCVQPGCTFLFSNELEGLENHFALEHPLVRWSGKCGMCRQKITATETNLRISEELRHMRDVHMKDISTLPPPQSSAVESPAVIESCLNQREPVPESEPDPVPELPKLRVRRFTGDRLVVDSQAEKSQPVAIVVSDDDNPRNGMLRDLLAADPRPPNQQLDLQAAGLGEFLCAKPDSPSTEPVKQTPVIVGYSSGLGLKIGQVLSRTQISANSRLSPVVNDPLPEKSSAPAAVEENRNRFRCMATNCNFVAHKLMFMREHMKFHSYSFSSTGHLNCAYCSHVAVDVDDYLRHGVIIHDLAPRSELESSTGPPSVTQKIRDMLSQRENGRVPPPTPQVTLSDVVLGLLECTGYSEDKLYACPQKGCIVRLTDEQLVNHLRYHIRSTHQGSELVKCKFCTKAMHPPALRTHLQQYHARHSIFCGICLATSVNQRIMMYHMSTVHSKAYGRPNARLAFVSLPVKIDASKKNVESEFYVAVVEQPFGNLQMQDFQRKLFDEMDRRRSGTKTYFRSSEVHILPTQPTFQRPLYCTECPFSTTSRVNMQMHLYEHKDETIREASKLADLIVPATSSVLTVSASTLVAPPRPGKDSEKPSTSGQSGDAATEQLNPDVPGTHKPIKPPLRYVPPDQRYRCGFLRCSVLCFSESAVRKHMQANHKYSEVVRCPHCKNCQGQFGVDKYFDHLAMHKRHIFQCGACSRHNSRRVIERHIQERHNIQDVDMIVHRHNDSNKTTEARWLKAPKLARHSLMEYTCNLCLKYFPTTVQIMAHAASVHKRNYQYHCPYCEFGGNLATALIEHILREHPEREVQPVQIYQRIVCKNKQTLGFYCTTCHEVASSFQKIAMHCDKEHKSRNPVQCPHCIFGHLAERQVVLHIQEKHPHERGLAMVQFERVLNDIPNSISWEIGRPIEVEPEKEIPNNGESAFLPLSQRQVVTEVVDLLDSDDEADEYGEQDDAKIVEFACTHCDGTNTNLPDLRSQHWAREHPDQPFYFRVQPMLLCSECKRFRGNAKALREHLRATHSIRSIVAADIRRPMECAYCDYRYKNRHDLAKHISEIGHLPNDLKHVTDDEIDALMLLSASGSGGAVNEYYQCGLCSVVMPTKETIVQHGQVEHCKPDERFCFRQLVSPVIYHCSFCMFNSTDELTTLRHMVDHYSRFLVCHFCTRSQPGGFDEYIQHCYTYHRDDIKSFRDVHTFSDLKRYLSQVHYQFQNGLIITKSSLRYTRYKSDKCMLELDAELMAKAQRPPIPRLHIRLKSTGVQMQSPEGADVEKPVSLLRITKRRKTLNPGELLRSFREENEVQPQPPASSTSSGTAPSPAAGSVFNLFKRRNSLVVRPATSNLDQH

SEQ ID NO: 19 - DNA, 3696 bp, Drosophila melanogaster
ataaggtgggaccaggaccacggggtgctgacccaaacaccatggtacatactgatcttagtgctgttctgctacaactgcgccgccgttgcctttgccataatggtggctgcctttttccggaacgctctcaacgccgttcgggtgttgacaatcctgtggataatgtcctacgtgcccaccttcattctgtcgaacaacttggagggcaatattcacgccctgcgctacgtgtcgtatgcgctgccaaatgtggtggcaactctggtgattgaatttctcatcgaacgggagtcgatcgtccatatcacgtgggaggactctgggtacagactcaactatgacggcggccacataacggtaaccgcgagctcctggatcttcatgctgaatgctttggtttactgtgcaattggtctctatgtggacatgtggcggggtggcgaccgatcgggtaagaagatgaagaaacccaacacgaatgccagtgtacaagaagatccataccacgaacggggggacagtttcactcatcagggtcaggccattggcgttaactcaacgaaaatctatgaggtggaaccctcacatcggcgcttcaagctaaagatcaagaagctgtgcaagcgatttgcgacaaacgatcgtccggcattaaatctcttctcgtggaatgtatacgagaacgaggtcaccgttctgatgggtcacaatggctgtggcaagagtacactgctcaaaatactagccggcttggtggagcccagtcggggcactgtgatgatatccagccacaatatacagaccgaaaggaaggcggcctcaatggagctgggcatcgcatttggccatgacatgcttctcaccggcttcacagtcattgattacttacgattcatttgccgagttaagggattgcacaataacatcgagatcgatggtcagtccaactactttcttaacgtcctgcaaatcggaggcctaaagaccaaacgaatccgcaccctcactgatcgcgatttgtgcctggttagcatctgctgtgcctttgtcggtaatagtcccataatcctcatagacgacgttcactccgatctggacaagcgcacgcagtcgctggtctggaacctgattaacgaggaaaagtccaagcgcaccattatcctggtgtccaactcgccggctctggccgaaaacattgccgatcgcatggccattatgtccaacggggagctcaagtgtaccggaacgaaaccgtttctaaagaatatgtacggacatggctatcgattgacctgcgttaaggggaagaactacaaaagggatgaactgttcggcatgatgaacagctatatgcccaacatgagcatcgagagggatattgggtacaaggtcacctttgtgctggagaacaagttcgaggatcagttccctatgctaatcgatgatctggaggagaatatgcagcagctgggtgtggtcagttttcggattcgggacacgtcgatggaggaaatcttcctgcgatttggatgcgaagacaatgaccaaagtggcgcttttcaatcgcacgaaaacgcgcaagtcctgctggaggagtactattccacactggctgaggccaatgaaaaaggtcgaaggactggctggaagctgttttttttgcatggcagggcggtgatctacaaacgttggattgcggcccaccgacactggatcgtattgatttttgaggttctggccatggccctggtcgcggtgtgcacattctccagcattttcatctacggcaagaactatgagttggaaccgctgacctttaacctcagccagctgcacactgtggacgccttcgtggagctcttttccgaagaggaggatgtcaaggatatgcacgcctattacacggagctgctctattggtacgacgctcatgtggcgacgctgacaaaaaaccgtcataacgcatacgccctgttgacccaaaaccaattcaccgcccacgtcaactcgcgctacattttcggagccacgttcgatcaaaagatcgtcaccgcctggtttaataatataccactgcactctgcaccctatgccttgaatgttgtccacaatgcggtagccaggcacttgttcgacgaggaggccaccattgatgtgaccctggcgccgctgccgttccggacggccattaacacctttccgcctagcagccatacatttggtggctgtttagcatttggcatttgcttcgtgctgacatttatttggccagcattcgcgatttacatgatcaccgagcgtggaagcttgctgaagaaacaacagtttttggccggagtcagggtgtgcagctactggacgtttacggtgttatatgacttgctcttcctgctgatcttctgcgcgtgcgttgtggtcatggtggcattatacgagaatccgaaccacgacgttatgctatacggttacatatcggtcacattgatgctgggaggattctgggtgatcctgcttgcgtatttaatggcgagcctgtgccggaacccgtgctatggatttttgtggctatgcgggattaacagtatcggcctcgtctgcttctcgcaattctatagaactcatccagaatctatgctcctcgagccgacctttatggccatgtacacggtggccacagttatatgcaagcttttcatgatctacgaattcaagctaatctgcatggatcccgtcgtgaattttacctccgtcgaggtattcaaatcggagtgcttgagcatcacgggagcaaacaactccggcaagactacgctgctcaaggtggtggtgaatgagacaaagatgaacgctggacagctctggatccatgactactcggtgaacacccaccgtgtccagtgctaccggatggtgggctactgtccgcaaaaagacagccttccgtcggagtttaccccgcgtgaattgctgtacattcacgccatgcttcagggccacaggcaccgcataggccgcgaattgtcggaggcactgctccgtctggtgggactcaccccttgctggaatcggtcagtgcgcatgtgcaccacaggtcaaatccggcgattatattttgcctacgccgtgctgggatccccggatctcatctgtgtggacggtgtaccagctggactggatccgaccgggaagcgaatcatcctgatgatgacctccaccatgcaggcgatggggtccagtttcttgtacactatgctcacaggtctggacgccgagcgactgtccctgcgcacgccacttcttttagagggccaactctggatgattcggcccatggacacagagaccgagaactataagagtggctaccagctggaggtacgattcaagaggaaggtcaatcctaatgtcagcatgtcccgggccacctggaacctaatcaaccactttcccatgtcaccaaacaagaagttcagtgccttcatggagatcaagtttcccgatgccgtgctcacaattgaaagagatgactcgatggtatttgtattgccgttgggcacgaccaccttctcggagatatttcttacactgcgcaaagatgccttcgaaatgaacatagaggactactttatcacacgcaacatgctcgtgggcttccagatatttacctatgatcaacatcaggacaatccataa

SEQ ID NO: 20 - protein, 1197 aa, Drosophila melanogaster
MVAAFFRNALNAVRVLTILWIMSYVPTFILSNNLEGNIHALRYVSYALPNVVATLVIEFLIERESIVHITWEDSGYRLNYDGGHITVTASSWIFMLNALVYCAIGLYVDMWRGGDRSGKKMKKPNTNASVQEDPYHERGDSFTHQGQAIGVNSTKIYEVEPSHRRFKLKIKKLCKRFATNDRPALNLFSWNVYENEVTVLMGHNGCGKSTLLKILAGLVEPSRGTVMISSHNIQTERKAASMELGIAFGHDMLLTGFTVIDYLRFICRVKGLHNNIEIDGQSNYFLNVLQIGGLKTKRIRTLTDRDLCLVSICCAFVGNSPIILIDDVHSDLDKRTQSLVWNLINEEKSKRTIILVSNSPALAENIADRMAIMSNGELKCTGTKPFLKNMYGHGYRLTCVKGKNYKRDELFGMMNSYMPNMSIERDIGYKVTFVLENKFEDQFPMLIDDLEENMQQLGVVSFRIRDTSMEEIFLRFGCEDNDQSGAFQSHENAQVLLEEYYSTLAEANEKGRRTGWKLFFLHGRAVIYKRWIAAHRHWIVLIFEVLAMALVAVCTFSSIFIYGKNYELEPLTFNLSQLHTVDAFVELFSEEEDVKDMHAYYTELLYWYDAHVATLTKNRHNAYALLTQNQFTAHVNSRYIFGATFDQKIVTAWFNNIPLHSAPYALNVVHNAVARHLFDEEATIDVTLAPLPFRTAINTFPPSSHTFGGCLAFGICFVLTFIWPAFAIYMITERGSLLKKQQFLAGVRVCSYWTFTVLYDLLFLLIFCACVVVMVALYENPNHDVMLYGYISVTLMLGGFWVILLAYLMASLCRNPCYGFLWLCGINSIGLVCFSQFYRTHPESMLLEPTFMAMYTVATVICKLFMIYEFKLICMDPVVNFTSVEVFKSECLSITGANNSGKTTLLKVVVNETKMNAGQLWIHDYSVNTHRVQCYRMVGYCPQKDSLPSEFTPRELLYIHAMLQGHRHRIGRELSEALLRLVGLTPCWNRSVRMCTTGQIRRLYFAYAVLGSPDLICVDGVPAGLDPTGKRIILMMTSTMQAMGSSFLYTMLTGLDAERLSLRTPLLLEGQLWMIRPMDTETENYKSGYQLEVRFKRKVNPNVSMSRATWNLINHFPMSPNKKFSAFMEIKFPDAVLTIERDDSMVFVLPLGTTTFSEIFLTLRKDAFEMNIEDYFITRNMLVGFQIFTYDQHQDNP

SEQ ID NO: 21 - DNA, 725 bp, Drosophila melanogaster
cagtgtgtttgtgtgcttcgttcggtgcggttctctctgtctctctctcgccttccccgagtattttgcgctggttttttgtcaacaacaagacaatccacaaaaccaacccgaattgttctctatataacgcagaaactaaatagttccggaaaacctcaaagaaaccaattcaaatatgtcggctgctacggaacaacagaacaacggcgatgtggccgtggagaaggtggcggcagatgatgtgtctgctgtcaaggacgatctcaaggcgaaggcggccgccgaggataaggccgctgctgccgatgccgccggcgacgcggccgacaacggtacgtcaaaggacggcgaggatgccgccgatgccgccgccgctgcccccgcaaaggaatccgtgaaaggcaccaagaggccagcagaagccaaatccgcagaatcaaagaaggccaagaaggccgcggccgccgatggagattccgatgaggaagaggctctggaggaaatcatcgagggcgacagtgaaatcgagagcgacgagtacgacatcccctacgatggtgaggaggatgacattgaatgtgatgatgatgatgatgataatgatgacggttccggctcggacgatcaggcgtaataataatgtagtcaaaaatacaaacaaaaacaaacaaaaatttaaattaataataaataaaagttacaagcaaaaaaaaaaaaaaaac

SEQ ID NO: 22 - protein, 152 aa, Drosophila melanogaster
MSAATEQQNNGDVAVEKVAADDVSAVKDDLKAKAAAEDKAAAADAAGDAADNGTSKDGEDAADAAAAAPAKESVKGTKRPAEAKSAESKKAKKAAAADGDSDEEEALEEIIEGDSEIESDEYDIPYDGEEDDIECDDDDDDNDDGSGSDDQA

SEQ ID NO: 23 - DNA, 2182 bp, Drosophila melanogaster
tacatatatattcttggccagagatatacatggtatatatggtctcggttcttctgcgcgcgtgttacaaatcaaaaagtttgcatatttttcgaaattataaataaaatcgttcgtttcatcgtttcaatcgccggtcaacaatcgagtgccagctgtgtttttttgccacttcgagaacgattccagagtgcttttcgccaaatttgatatgtgtaaataatgtgcgagcagagccaataaatatattccgataagcttccgaaataaatcagcgttcaaacgtttaaacgttttgtaaacagcacggtggaacaccaagagtacacacaaaatggatagcagcaagttgttgaagaatgtctacggcatcgacattcacttcgaagatctcgtctaccaggtcaacgtacccaaaaagccagagaagaagtccgtgctgaagggcatcaagggtacgttcaagtcgggcgaactgaccgccataatgggcccctcgggggcgggcaaatctagtcttatgaacatcctcaccggtctgaccaaatccggcgtcagcgggaagatcgagatcgggaaggcgcgcaaactgtgcggctacattatgcaggacgatcacttctttccctacttcaccgtcgaggagaccatgctgatggcggccacacttaaaatctccaatcagtgcgtcagtctgaaggaaaagcgaactctgatcgactatctgctgaactcgctgaagctgacgaagacgcggcagacgaagtgctccaacctgagtggcggccagaagaagcgcctatccatcgccctggaactgatagacaatccagctgtgctatttttagacgagcccacaaccggattggacagctcctcctccttcgacaccatccagctgctgcgcggcctggccaacgagggacgtaccatcgtgtgcaccatccaccagccgtcgacgaacatctacaatctctttaacctggtctacgtgctaagcgcgggtcgatgcacctaccagggcacgccccagaacacggtcatgtttctcagcagcgtgggcctggagtgcccgccctaccacaatcccgccgacttcctgctggaatgcgcgaacggggactacggcgatcagacggaggctctggcggaagcggccaaggacatacgctggagatacgatcagcagttgatgcagggcgaggatgccgatgcgcccagcgagacgcaggtggccaagttcaatgaatctcagtcaccggggcaggtccaggtgcaggtgcagaagatcgagatccagaacatggagtcgtcgaaggatctgaccaagcacacctatccgcccacggaatacatgcgactgtggctgctcatcggccggtgtcatcttcagttcttcagggattggactcttacctacctgaagctgggcattcatgtgctctgttccattttgattggcttgttcttcggcgattcgggcagcaatgccaccaagcaaatttccaatgtcggcatgatcatgatccattgcgtatatctctggtacaccaccattatgccgggcatattgagatatcccgccgaaatagagatcatcagaaaggagaccttcaacaactggtacaaattgcgaacctattaccttgccaccatcatcacatccacaccagtccatatcatcttctcgacggtgtatataacgataggatatctgatgaccgatcagcccgtggaaatggatcgatttgttaagtacctactaagtgcggtggtggtcacgatctgtgcggatggtctgggcgtctttctgggcaccgtgctgaatccagtgaatggaactttcgttggcgccgtttcgacgtcatgtatgctaatgttctccggcttcctcatcctgctgaatcacattccggctgccatgcgattcatggcctatatatcgccacttcgctacgccctcgaaaacatggtgatctcgctgtacggcaatcagcgtggccagttgatctgcccgcccacggagttctattgccacttcaagaacgctgtgactgtgctgcgacaatttggtatggaggacggcgactttggtcacaacattctcatgatcctcatccaaatagcgatattcaaggttctgtcctactttacgctgaagcacaagatcaagacgaactga

SEQ ID NO: 24 - protein, 615 aa, Drosophila melanogaster
MDSSKLLKNVYGIDIHFEDLVYQVNVPKKPEKKSVLKGIKGTFKSGELTAIMGPSGAGKSSLMNILTGLTKSGVSGKIEIGKARKLCGYIMQDDHFFPYFTVEETMLMAATLKISNQCVSLKEKRTLIDYLLNSLKLTKTRQTKCSNLSGGQKKRLSIALELIDNPAVLFLDEPTTGLDSSSSFDTIQLLRGLANEGRTIVCTIHQPSTNIYNLFNLVYVLSAGRCTYQGTPQNTVMFLSSVGLECPPYHNPADFLLECANGDYGDQTEALAEAAKDIRWRYDQQLMQGEDADAPSETQVAKFNESQSPGQVQVQVQKIEIQNMESSKDLTKHTYPPTEYMRLWLLIGRCHLQFFRDWTLTYLKLGIHVLCSILIGLFFGDSGSNATKQISNVGMIMIHCVYLWYTTIMPGILRYPAEIEIIRKETFNNWYKLRTYYLATIITSTPVHIIFSTVYITIGYLMTDQPVEMDRFVKYLLSAVVVTICADGLGVFLGTVLNPVNGTFVGAVSTSCMLMFSGFLILLNHIPAAMRFMAYISPLRYALENMVISLYGNQRGQLICPPTEFYCHFKNAVTVLRQFGMEDGDFGHNILMILIQIAIFKVLSYFTLKHKIKTN

SEQ ID NO: 25 - DNA, 327 bp, Drosophila melanogaster
atgagttcctacaggacattggtggatcatggccatccgattatagtgggaagcagtgaaatatcgctggccccgagttcggcagccagttcgcccaagcccctacaccggatgatcaagtactggcgcaacagttccggaaaaattccgggtctccgcaaaagcgagagtttcgccgagtatcgtcgccattcatccaactcggccacaatttcgggaggatcagggggcagatcgagcacttcgagtgccaggcaattgcaataccagcgactggagatggaaagctgcgagaatatagatatgctgacagaaccactaaggtaa

SEQ ID NO: 26 - protein, 108 aa, Drosophila melanogaster
MSSYRTLVDHGHPIIVGSSEISLAPSSAASSPKPLHRMIKYWRNSSGKIPGLRKSESFAEYRRHSSNSATISGGSGGRSSTSSARQLQYQRLEMESCENIDMLTEPLR

SEQ ID NO: 27 - DNA, 797 bp, Drosophila melanogaster
agccgctagaccacgtaacgccacgattttcgccggatccaccgattcgattcgattcgccgcgatcgtcagtgcctatatatacagttcccaacggagccgagcgataaagataaatgtgcaaaaacaaagcgcacttagataaagatagcgaagttctcccatgtggaaggcacagtgcaagtgaagtgaaacgagaacgcagttttgaataggaaatacgaaagtactcacatatatagagaacccgagacttggagtcagaatgcaaatgtggcgagcataaagtcgcaaagcgtgaaaatctacgatatatacgagtatagtcgattccaagtgtcagccaagtgaaacccagtgtgcagccgaaaccaaaccgaatgactatgacttctacggtgctccaacggcccattcaagccaagccagagaagaaggcctcctccaaatcgaccagctcctcgagaagccgctccacgatggcctggtccaatgagaagctgcgcttctcctgcatcgacaacatcggactcaagcagctatggaagctgattgccctggacacgagtgcttcatccaagcagcgcagtgccatgatgttggaagtggagcaacagcagcaacagcagcagcagcagcaatcgaacaacaataacgagcggatacccaacgagaactgcgactatttgagtctacagagatcgggccaggcgccgaagaatcacatccaggcgcaggatccggctcagatgtccctgctcaagttcttggccattgtaagtaccccatgttgttag

SEQ ID NO: 28 - protein, 138 aa, Drosophila melanogaster
MTMTSTVLQRPIQAKPEKKASSKSTSSSRSRSTMAWSNEKLRFSCIDNIGLKQLWKLIALDTSASSKQRSAMMLEVEQQQQQQQQQQSNNNNERIPNENCDYLSLQRSGQAPKNHIQAQDPAQMSLLKFLAIVSTPCC

SEQ ID NO: 29 - DNA, 759 bp, Drosophila melanogaster
atgcagaattctccggctccgtgtgcctggtacttgccctggtccctggccgcccagcagcaccagcaaaagatgctgcaaatgcagtcgccgtttctggacaagatgggcgccacatcggtgggcggcatcttcgctggccagccgcagatgcagcaacaattgtcgcccaatacggcagcagcaccgccggcaaactatcagcagcccgctttgcatccaagcgccgcaccaggcgcaccacacttccacatgggatccccgtatagccatctggcaccgcagctcctcaacgccggacagctgaaccagaacgcactgatgcactccgccatgttctcttccctgccacttggtgcgtactatgcacccgccgccggcgcaggtcactcggcctttggtggcgttcccctgaccacggctgcccagcaatctctattggccgccaccggaggagcaactgctggccatttggccaaccagcagacgacggctcaagtgcccgtccaggtgcccgtgcaaatggcccaacggacagctccggccgcctgctccatggtccagccacttaactgcctgccgcaccaggaactgaatcacctgtcgtccatcaatctcaacctgctgcgcagtccggcgcctccgctcccagccattcaggtcttgccaagtgccgaggtgccgattaataagaaggtgagttgcagtttgcttagtacttgtaatgataggcactattcgtacttgagcgaaggctag

SEQ ID NO: 30 - protein, 252 aa, Drosophila melanogaster
MQNSPAPCAWYLPWSLAAQQHQQKMLQMQSPFLDKMGATSVGGIFAGQPQMQQQLSPNTAAAPPANYQQPALHPSAAPGAPHFHMGSPYSHLAPQLLNAGQLNQNALMHSAMFSSLPLGAYYAPAAGAGHSAFGGVPLTTAAQQSLLAATGGATAGHLANQQTTAQVPVQVPVQMAQRTAPAACSMVQPLNCLPHQELNHLSSINLNLLRSPAPPLPAIQVLPSAEVPINKKVSCSLLSTCNDRHYSYLSEG

SEQ ID NO: 31 - DNA, 2002 bp, Drosophila melanogaster
tttcggcataaaaacgtaattttcatgcggtttttgcggcaatttagggacgtttttcgtttggcaagtggtgtttgtgttatgaattaaagtaacatttaactcattcaattgaatcatcgcataaagcagagtgtttttgtgtttgaaactgaaatctgcgcacgtgttgactaacttgttgttattattatagcgttgcttagatattctagtaaattggccgcaaatcaaaaactataaacaattctcgtggctgttgaaaatggagagttccaaactcttgagaaatgcacaaacccagcatggagatgcctcatccgtggacgtggaaaacatattcctgcaccgccatatgctatacacaaatcccacttcggatggcaatctccatgatcgggaagattcccccgaatgcgtgtggtgtccagacgacaaggatggtagtccagctgaaagcaaagatccaccggtgtggacggattggaaatgtgccatcaagagcatgtggaaacagaaacatgagccaatgaaggcgacggaagaagagcatgtcattatcctccagttggataagttccaagatgctgatccggatgaaatcagggtgtatcaagaagcagtacccaagggaatatccatatcagaggaaaagtctgaaacgcaatcaaaagaagttttgtcggaaaagcgaaaagctagcagcacagatgacgaagggcatgtgaaaaaagtaaaattagaggccaatagtctaaaaacgaagcgtcctggattcagcgatgaaagatacgacgaaacatcgtattattttgagaatggtctgcggaaggtgtatccttattttttcacattcaccacgttcgccaaaggacgttgggttgatgagaaaattctggatgtatttgtccgcgaatttcgagccgcaccgccggaggaatatgaacgcagcctggaagcgggaaaattgactgttaactctgagaaagtgcccaaggactataaaatcaagcacaatgatctgctggccaatgtggtgcatagacacgaagtccctgttacttcacagcccatcaagattgtgtacatggacaaggatattgtggttgtgaataagccggcatcgataccggtacatccttgtggaagatatagacacaacacggtagttttcatcctggccaaggagcacaatctgaagaacctgcgaaccattcacagattggatcgtctcacatctggcctacttttgtttggacggactgctgaaaaagcccgcgaattggagctgcaaatccgaactcgccaagtgcaaaaggaatacgtttgccgcgttgaaggacgctttccagatggcatagttgaatgcaatgagaaaatcgacgtcgtgagctacaaaataggtgtttgtaaggtttcaccgaagggcaaggactgtaagaccacatttaaaagaatcggcgaggtgggcagtgatagtattgttttgtgcaaaccactaacaggacgaatgcaccaaatacgagtgcatttacaattcttgggctatcccatttcaaatgatcctttgtacaaccatgaagttttcggtccattgaaaggaagaggaggagatatcggtggaataaccgaggaacagttgatcagtaacctaattagcattcataatgcagaaaactggttgggcttggaaggagatcaaatcgtatcaggggaaataaaagacgtagcagcaagtacttcagtagtagaggctccctcagtagttcaggctcctattaatagtgaaactgaaaagcctgtgatttcaaaaaaccttgaaccaagtaacgatacaacttcggatccgcaatgttctgaatgcaagataaactacagagaccccggcacaaaggatctcataatgtacttgcatgcatggaaatacaaggtcagtttcaaactatacatttttaaagatttaatttcaaattaaatcttattttcagggcgttggttggga

SEQ ID NO: 32 - protein, 569 aa, Drosophila melanogaster
MESSKLLRNAQTQHGDASSVDVENIFLHRHMLYTNPTSDGNLHDREDSPECVWCPDDKDGSPAESKDPPVWTDWKCAIKSMWKQKHEPMKATEEEHVIILQLDKFQDADPDEIRVYQEAVPKGISISEEKSETQSKEVLSEKRKASSTDDEGHVKKVKLEANSLKTKRPGFSDERYDETSYYFENGLRKVYPYFFTFTTFAKGRWVDEKILDVFVREFRAAPPEEYERSLEAGKLTVNSEKVPKDYKIKHNDLLANVVHRHEVPVTSQPIKIVYMDKDIVVVNKPASIPVHPCGRYRHNTVVFILAKEHNLKNLRTIHRLDRLTSGLLLFGRTAEKARELELQIRTRQVQKEYVCRVEGRFPDGIVECNEKIDVVSYKIGVCKVSPKGKDCKTTFKRIGEVGSDSIVLCKPLTGRMHQIRVHLQFLGYPISNDPLYNHEVFGPLKGRGGDIGGITEEQLISNLISIHNAENWLGLEGDQIVSGEIKDVAASTSVVEAPSVVQAPINSETEKPVISKNLEPSNDTTSDPQCSECKINYRDPGTKDLIMYLHAWKYKVSFKLYIFKDLISN

SEQ ID NO: 33 - DNA, 351 bp, Drosophila melanogaster
atggctcccaagatcgtcgagatctccgctcctccggccaaccattcagacccaagatatatgagccagtgctatgttgtgactgctgcccgctgtgcacctgtgcccagggatgtggacgtggatgtgaatgtggacgaggatgtggatgaggagatgagcctggctaaaaaccgagcagatgagcaggcgaaatggacttttaaatgttgccatttgttgcgtgaaaacgcaaccggtagccaaaaaacgttcagcattgcgatttcttgggctgcggagggtttcggaattgccacgtttcccgggattgcctctgatcttggactgtgggctccactcagctattag

SEQ ID NO: 34 - protein, 116 aa, Drosophila melanogaster
MAPKIVEISAPPANHSDPRYMSQCYVVTAARCAPVPRDVDVDVNVDEDVDEEMSLAKNRADEQAKWTFKCCHLLRENATGSQKTFSIAISWAAEGFGIATFPGIASDLGLWAPLSY

SEQ ID NO: 35 - DNA, 2019 bp, Drosophila melanogaster
gttcttgtgtcggaacattcggtaccaaaacttcggacgctgcggctttcgtactatttatgattttttgtgttgtgacaaatgcgatttatttgcggacaaaagtggcttttggcaatcagctggtattgttctgcgagagccgtaccaaatagtgcataacataaaataaaacaaaacgagtactggaaaaaaaaaagtatctaaagtcaaacatttgggtcccctggcaacacttgcattttccctcacgaccaatcgcccaatataactcccggctgacacacatttgatgagaacaaacagcaaacttaaaaaaatctaccgaaaataatgtcaacgaaatcaatggcagcccacggcagctgcaacatgttgctgctgtgtcttctgctcctgctgccgtcggtctcccccgtccgcttgcccaaaagcagcagcaacaatgcaacagcagcaacaacagcagcgaccgcatcaaccgaatcaaccgcaacagcagcaacaactgctgcaatccgcaatgccaatgccaaggctggtagcaaatatgagatacgcggcgttgccggtgaaccaaattacaaatcggtgaatctgacctgggaagttgaattcgtgccgtcggcccatgacacagattcgagccccaactccaactccagagcggaccaggtgaacgcgacaaatatgagcggcgatgtggaaccgccccgggatctggcattccagatattctactgtgagatgcagaactacggcccacagcggtgtcgcgtcaaattggtgaatggcaccaccgccgaggtgtcccaggaggagaatgagaaggcgacggatcagcaggagaagcatgaaccctcagggtcccaggtgcaccactttgttgctgccgtggacaacttgcgcatggccaccaaatacagtttccacgttcgcccggctgctcagaagcgcctccaggcgggcggaactcgcagctccaatgcccgggcagactttcacgatgaaaacaacgagatcgagagtggatccggacatctggcgggccagagcatcgtcatacccaccaagggcttcaccgcacatgccacccagtgtttgccgcatgcctcagagatcgaggtggagacgggtccgtacttcggaggacgcatcgtcgtggatggaggaaactgtgggatcaagggcgatgccagcgatgcggcggacaagtacacgatgaggatcgatcacaaagagtgtggaagcttggtgaaaccggagaccaacacggtggagaccttcatcacggtacaggaaaaccttggcatatttacccacagcacaagacgctttgtggtggtctgcagctaccactcaggcatgcagacggtccgagcaagcttcactgtacctggaaagaacggggtggccgccgcctacgagcccaacgacccctttgagccagacgaggatcaacgcctgggcagggaactccgaccgatgcgctacgtcaacaagacggagctggtgcttcgcgaaccggactcccagcgggagtcccaatccgattcggagtccgtggaacaggctgcggtggtggaacaggccccgacgcccaccaccgagcaggcttctcagcccagaggtcagggcagagctctgaacctcaacgaggtcaacagtttggccgatgagccggcggaggaacatcacttggagcctgtggtgggcaccaagtacgccaaactggttgtcgaccagagccacagttcctggatgccgttggaggtgggctcgccatcaggtggtagcgacgagaatgaagccgttctgcgttatattggctcccatcttagcagcgtgctggtaaccgtctcgctatctgtgataatcatcagcatttgcatcgttctgctgcagcgccagcggatccgctctccgccccgcagcccatccccctgcctggccgcccacctgccgcacaaaacgttgccgcgtgcactgcagcagcagcagtaccagtgcaccttgtag

SEQ ID NO: 36 - protein, 556 aa, Drosophila melanogaster
MAAHGSCNMLLLCLLLLLPSVSPVRLPKSSSNNATAATTAATASTESTATAATTAAIRNANAKAGSKYEIRGVAGEPNYKSVNLTWEVEFVPSAHDTDSSPNSNSRADQVNATNMSGDVEPPRDLAFQIFYCEMQNYGPQRCRVKLVNGTTAEVSQEENEKATDQQEKHEPSGSQVHHFVAAVDNLRMATKYSFHVRPAAQKRLQAGGTRSSNARADFHDENNEIESGSGHLAGQSIVIPTKGFTAHATQCLPHASEIEVETGPYFGGRIVVDGGNCGIKGDASDAADKYTMRIDHKECGSLVKPETNTVETFITVQENLGIFTHSTRRFVVVCSYHSGMQTVRASFTVPGKNGVAAAYEPNDPFEPDEDQRLGRELRPMRYVNKTELVLREPDSQRESQSDSESVEQAAVVEQAPTPTTEQASQPRGQGRALNLNEVNSLADEPAEEHHLEPVVGTKYAKLVVDQSHSSWMPLEVGSPSGGSDENEAVLRYIGSHLSSVLVTVSLSVIIISICIVLLQRQRIRSPPRSPSPCLAAHLPHKTLPRALQQQQYQCTL

SEQ ID NO: 37 - DNA, 2421 bp, Drosophila melanogaster
agcccgccaaaacagatatgttattgcgcttatttagaaaaccaagaaaaaacacgagaacacgtgaaaatacaaatctacccaaatgaaatgggtcctgctcagaaatccggaacagatattagtatcgatgatgaggaggaaatactggctctggaaaaactactgggtgcagcagaaaacgaaaatacaaaatctgcagagtcagaaaaagcaaaacccaccgcacccattttggtgccaaaactacgagaagacaacagttttgctaatgccttcaccttcgagaagatcgtgaaaccggaaaagcagaagaatgctgctatcattaaggaaccagagctggactcgtccgacgacgaggaggtaaagaacttcctggaacgaaagtacaatgagtacggcagtgatataaacaagagactgaagcagcagcaggagaacgcctacgagtccaaggtggcgagggaggtggatcaggagcttaagaagtctatccacgtggttacatccaccccgcaacccctgaaaaatccgcataatcctattaaacggcaatcggcggtgagcaccacgtttcaacgtcctccgccagtcgctgccgccgtggcatctacatcccagtcaagtgctcccgtatctgctgtttttacggatccagtcttcggactgcgcatgatcaatccgctagtctccagctcactgctgcaggagcgcatgacgggcaggaaacctgtgcccttctcaggcgttgcgtatcacatcgagcgaggcgatttggccaaagattgggtcattgctggcgcgctggtttccaaaaatcctgtaaaaaacaccaagaagggtgatccctactccacgtggaaactatccgatctacggggagaggttaaaacgatctcacttttcctttttaaagaggcccacaaatccctgtggaaaacagcggagggtctgtgcttggctgtgttgaatccaactattttcgagaggagagcgggaagctccgatgtggcctgcctatccatcgatagctcccagaaagtcatgatcctgggtcaatccaaagatttgggcacatgtcgggccaccaaaaaaaatggggacaagtgcacttcggtggttaacctaaccgactgtgattattgcatttttcatgtaaagcaggaatatggcaagatgtcccgacgttctgaactgcaatcggcgaccgcaggtcgtggtatcaatgaactaagaaacaaggttttgggcaaaaacgaggtattttacggcggccaaacatttactgcagttcccgcaagaaaaagtgccaagttaatcaccaaggaacgtgatcgtctgagtatgctggctggctatgatgtttcccccttcgcccataccgctaaccacacctcaaagcccaaaacagccgaacccactaaaattccatatgcagaacgtggcggtcctgtttcccgtttggctggtggtgtggaagcgtctaggaaacagagagtccaagatctagagcggttgcgtctgcttaaagaggaaaatgagcgctttgaaaaaaagaagcaggcggagggccatgtcttgggaagtgataacaaaaaagaatctgaagcaggcacacccgctgtcagtatgcccactacacctgttccagataaattcaaaaatcgaggcttctcctttgatgccagtttaacgcccaagctttccggtagcgagaacttttcctttgaaatcaatgtaggatctcgccaggcacaaaatgctaagctgaaagcagctgccctgctgaagaagaagccactggagaagatcaaccccaactccacacgaggcagtgaaagtgggaagagaagagccatcgatgaactcaacgagaagttctctagcagcgccaagcgacaaaaaattgatgaggacgatcgggagttaatgcgcaaatcaagaatcgaaaaaataatggcagccacctcatcgcatacgaatctcgtggaaatgcgagagcgcgaagcgcaggaagagtactttaacaagcttgaacgcaaggaagcgatggaagagaagatgctgaccacatacaagatgccatgcaaggccgtcatctgccaggtgtgcaagtacacagccttttccgcttccgatcgctgcaaggagcagaagcaccccttaaaggtggtcgatgctgaaaagcgattctttcagtgcaaagactgcggaaatcgaactactaccgtattcaagttgcccaaacagagctgtaagaattgcaaggggtcgcgatggcaaaggacggctatgatacgggagaaaaagatactgactggtagagaaactctatccgtgagaggagacgaggaaacctttatgggctgcctagcaggcagtgctaatctcaacttgctggtacccgatgaagagtga

SEQ ID NO: 38 - protein, 581 aa, Drosophila melanogaster
MINPLVSSSLLQERMTGRKPVPFSGVAYHIERGDLAKDWVIAGALVSKNPVKNTKKGDPYSTWKLSDLRGEVKTISLFLFKEAHKSLWKTAEGLCLAVLNPTIFERRAGSSDVACLSIDSSQKVMILGQSKDLGTCRATKKNGDKCTSVVNLTDCDYCIFHVKQEYGKMSRRSELQSATAGRGINELRNKVLGKNEVFYGGQTFTAVPARKSAKLITKERDRLSMLAGYDVSPFAHTANHTSKPKTAEPTKIPYAERGGPVSRLAGGVEASRKQRVQDLERLRLLKEENERFEKKKQAEGHVLGSDNKKESEAGTPAVSMPTTPVPDKFKNRGFSFDASLTPKLSGSENFSFEINVGSRQAQNAKLKAAALLKKKPLEKINPNSTRGSESGKRRAIDELNEKFSSSAKRQKIDEDDRELMRKSRIEKIMAATSSHTNLVEMREREAQEEYFNKLERKEAMEEKMLTTYKMPCKAVICQVCKYTAFSASDRCKEQKHPLKVVDAEKRFFQCKDCGNRTTTVFKLPKQSCKNCKGSRWQRTAMIREKKILTGRETLSVRGDEETFMGCLAGSANLNLLVPDEE

SEQ ID NO: 39 - DNA, 2418 bp, Drosophila melanogaster
atatggtcatccgctcgtcaataagtcatctttcggctttaattcgcgaaaaaactgcaggaaatccaaaaggaaagtccctggaagcggccataataacgcagccgtgaaaatcacagggatttcatcgccagctgtgtcgagcagccctggatacgcggaaaagaagctgcagcagccgaagaaattttgagtgtgtgcgtgaggaaggaaaacgggggaccgcaaacaacggatcgcgaatttcgtcttaagacaaagtcttgcgctgcttgtcacggtattccacggccttgccgacggacttcccggttctggaaaaccgcagccaggctaaaacgagagaagtgctgcaacgataaagaaatgaactcaaacatttttctgggcacagcagagaatggcctgcggcatgataagattgttatacttgatgcgggagcacagtacggcaaggttatcgaccgtaaggtacgcgaactcttcgttgagacggatatccttcctctggatacgccagctgccacgatacgcaacaatggctatcgaggcatcatcatctccggcggacccaactcagtctacgctgaggatgcgcccagctatgatcccgatctgttcaagctaaaaatacctatgctgggcatctgctacggcatgcagctaatcaacaaagagttcgggggcacagtgctcaagaaggatgttcgagaggatggccaacaaaatatcgagatcgagacctcgtgcccgctctttagtcgcctcagtcgcacacagtccgtgctgttaacccacggagatagcgttgagagggtaggcgagaatctgaagattggtggctggtctacaaaccgcattgtgacagccatttacaatgaagtactacgcatctacggcgtacagttccatcctgaggtggacctcactatcaatggcaaacagatgctatcgaacttcctgtacgaaatctgcgaactgacacctaactttaccatgggtagtcgaaaggaggagtgcatacgctatatccgtgagaaagtgggcaacaataaggtgttgctcctggtcagcggcggcgtggattcgagtgtctgtgcagctttgctccgccgtgctttgtaccctcatcagataattgccgtgcatgtagataatggtttcatgcgcaagaaggaaagtgaaaaggtggagcgttcactgcgcgatattggcattgatttaatcgtccgaaaagaaggctacacgttccttaaaggcaccacgcaggtcaagaggcccggacagtactccgtggtggaaacgccgatgttatgtcagacatacaatccggaggaaaaacgcaagataattggtgatatattcgtcaaggtgaccaatgatgtagtagccgaattgaaactaaagcccgaagaagttatgttggcccagggaaccctccgaccagatctgatcgagtccgcctctagcatggtgagcacgaatgcagaaacaatcaaaacgcaccacaatgacacggatctgatcagagagcttcgtaacgcaggacgtgtggttgagcccctttgcgactttcataaggatgaagtgcgcgaccttggcaatgatcttggcctgcctcaagagcttgtggagaggcaaccctttccgggtcctggcctggcaatccgcgtcctttgcgctgaggaggcatacatggaaaaggactactcagaaactcaggttattatccgcgtgattgtagactacaagaataaactgcagaagaaccatgctttgatcaaccgcgtaacggcggccacgagcgaggcggaacagaaagaccttatgcgtatctcatcgaactcgcagatccaggcaactttgctgcccatccgatcagtgggcgtgcaaggtgataaacggtcatatagctacgtagtaggcctatccacgagccaggagcccaactggcaggatcttctcttcctcgccaaaatcataccgcgaattctgcacaacgtgaacagggtgtgctatatcttcggcgaacccgtacagtatctagtgacggatattacgcacaccacactgaatactgtagttctttcgcagctgaggcaagccgatgatattgccaatgaaatcataatgcaagctggactataccggaagatctcgcagatgcctgttgttctcatacccgtgcactttgaccgcgatcccattaaccgcacaccctcgtgcagaaggtcggtagtgctgcgtccgttcataacgaacgactttatgactggtgtgccggctgagcccggatccgtgcaaatgcctttgcaagtcctaaatcaaattgtacgcgatatatccaagctggatggaatctcgagggtgctgtacgacttgacagccaagccgccgggcaccaccgaatgggaatga

SEQ ID NO: 40 - protein, 683 aa, Drosophila melanogaster
MNSNIFLGTAENGLRHDKIVILDAGAQYGKVIDRKVRELFVETDILPLDTPAATIRNNGYRGIIISGGPNSVYAEDAPSYDPDLFKLKIPMLGICYGMQLINKEFGGTVLKKDVREDGQQNIEIETSCPLFSRLSRTQSVLLTHGDSVERVGENLKIGGWSTNRIVTAIYNEVLRIYGVQFHPEVDLTINGKQMLSNFLYEICELTPNFTMGSRKEECIRYIREKVGNNKVLLLVSGGVDSSVCAALLRRALYPHQIIAVHVDNGFMRKKESEKVERSLRDIGIDLIVRKEGYTFLKGTTQVKRPGQYSVVETPMLCQTYNPEEKRKIIGDIFVKVTNDVVAELKLKPEEVMLAQGTLRPDLIESASSMVSTNAETIKTHHNDTDLIRELRNAGRVVEPLCDFHKDEVRDLGNDLGLPQELVERQPFPGPGLAIRVLCAEEAYMEKDYSETQVIIRVIVDYKNKLQKNHALINRVTAATSEAEQKDLMRISSNSQIQATLLPIRSVGVQGDKRSYSYVVGLSTSQEPNWQDLLFLAKIIPRILHNVNRVCYIFGEPVQYLVTDITHTTLNTVVLSQLRQADDIANEIIMQAGLYRKISQMPVVLIPVHFDRDPINRTPSCRRSVVLRPFITNDFMTGVPAEPGSVQMPLQVLNQIVRDISKLDGISRVLYDLTAKPPGTTEWE

SEQ ID NO: 41 - DNA, 4497 bp, Drosophila melanogaster
ttttgctaggcgtggagtaagatgaacgcgaacagaaacttttgaattttgaagtaaaatttaaatttaagtgaaagtgttaagtctgccatacgaaagcatttaaatgaagtaatacatatgtataaatgtacatatatacacttaacccactgctgaggtctccagctttcagtgccagtttggagtccacgacggagaagttaagccacaacttctggcatcagattaagagctaaacctatttcagcagtagccgcaagcatttgaacaccccactgacgatgtttaccggccggcgcactatggcggctacgttaacagaggctacgatgatttagacagttcctactactttgcccagtacgaggcgatggcagatgccggcaccgttggaggcgccttgccgccctacgcacttaccaactcggacgaagaacatggcagcggggaagaggacgcgtcggaggagaactccaacaatgaagagggagagggagtgttccgggactgcacagacgaagcggttgtcgagcatcataaccgctgcctgccagaatttcagttctctctagtcgattctgagtacgatgagaccctcgcttttcctgattctgtgaccattctatccaacgtgggcgacaagccggtgctggtggagcgcaaggagacggacgatgatgaggaggagttcgacgacgaggaaaacaacagtgtagtcctgagacacgaaataccatttactagcatatacgggccgagcgtcaagttcaactcgttccagcgcaaggttttcatcccgggccgtgagattcatgttcggatcgtcgatacggagcgtagcgtcactacacatctgctaaaccccaatctgtacacaatcgagctgacccacggtcccttcaagtggacgatcaagcggcgatacaagcactttaactcgttgcaccagcagctcagctttttccgcacctcgctcaacattccttttcccagtcgcagtcacaaggagaagcgtaccactttgaaagccacagccagagagatggctgacgagtccactctaaaggaccttccttctcacaccaaggtcaaacaaactagcactccgctgagggctgaaggcagaagcagtaaaatcgcgggcagtaacgccaacaatgccatggctatgatcagtcccaatcacagctccattctggcgggtctaacaccacgacgcattcaaaagaagcgcaaaaaaaagaagaaacggaagctgccgcgattcccaaaccgtcctgagagtctggtcaccgtagagaatctgagcgtcagaataaaacagctggaggactacttgtacaacctgctgaacatcagcttgtaccgatctcaccatgaaacgctaaacttcgttgaagtgtctaatgtgtcctttgttccgggaatgggaattaagggcaaggaaggcgtgattttaaagcgaactggatcaacgagaccagggcaagcaggatgcaatttttttgggtgctttcaaaagaactgctgtgtgcgctgcaactacttttgctccgacgtagtttgcggcacgtggcggaaccgatggtttttcgtaaaagagacctgcttcggctacatccgtccaacagacggaagcatccgggcagtgatcctctttgatcagggcttcgacgtttccacgggtatctatcagacgggcatgcgcaagggcttgcaggtactgacgaacaaccgtcacattgtgctcaagtgctggacacggcgtaagtgtaaagagtggatgcaatacctcaagaacacggccaactcgtatgcgcgcgacttcaccctgcccaatccgcacatgtccttcgctccgatgcgcgccaacactcatgccacgtgtcccgagatatacatgaagcgacccgcactcgacggagactactggcgattggacaagatcctgttgcgcaaggccgaacagggagtgcgcgtctttgtgctgctctacaaggaggttgaaatggcacttggcataaacagctactacagcaagtccacgctggccaagcatgaaaacatcaaggtcatgcgtcatccggaccatgctagaggaggtattctgctttgggcacatcacgaaaagatcgtcgtaatcgaccaaacctatgcgtttatgggaggtattgatttgtgctatggacgttgggatgatcaccaccatcggctaacggatctgggtagcatatctacgtcatctttttctggcagcacgcgtcgaacgccaagtttgtacttcaccaaagacgacacggactcagctttcggatcacgtaagtcctcgcgaaacgctcactacgatacctccgccaaggaaaggccaccgtccccacccccggatgagcccaatactagcatagagttgaaaactcttaagcctggtgatcgactgcttataccgtctacgctcgtttcgagtccgggtgaaactcccgcagaatcgggaatcgctttagaagggatgaaactcaacacccctgaaatggagcgtaagaacgtactcgatcgcctgaagaacaacgcgatgaagggcgcccgtatgggcaaggactttatgcaccgtctaacagctactgagacggaggaaaaatctgcggaggtgtacactatcgagtccgaggaagctacggaccacgaagtcaaccttaacatggcttcaggtgggcaggaagtggcgattaccactagcagtacacaaatactcagtgagttctgcggccaggccaagtactggttcggcaaggattactccaactttatacttaaagactggatgaacctaaactcgccgttcgtggatatcatagatcgaacaacaacaccgcggatgccatggcacgacgtgggtctgtgtgtggtgggtacttccgctagggatgtggcccgccacttcattcagcgctggaatgccatgaagctggagaaactacgcgataacacgagattcccctatttgatgccaaaaagctatcaccaagtgaggctcaatccgaacattcagcaaaaccgtcagcaacgggtcacgtgccagctacttcgaagcgtctctgcctggagctgcggctttatagaggcggatcttgtggagcaaagcatccacgatgcctacatccagacgatcaccaaggcgcagcactacgtgtacatcgaaaaccaattttttatcactatgcagttaggcatgggtgtgccaggtgcttataacaatgtgcggaatcaaatcggggaaacactctttaaacggatcgttagagcgcacaagtatgaaaccaaaatacttatcctgattctagcagatctaatgttcagctcttctagggaacggaagcctttccgagtttatgtgattatgccgctcctaccgggctttgagggtgatgtcggtggcagtactgggatagcagtcagagcaattacacactggaactatgcgtccatttccaggggacgcacatcaattttgacccgcctgcaggaggcgggtattgccaatccggaaaactatatctcattccacagcctgcgcaaccattcttttttgaataacacacccataacagagttgatatatgtccactcaaagctcttgatagccgacgatcgcgttgtaatctgcggttcggcaaacattaacgatcgctctatgatcggaaagcgggactccgagatagcggctattctaatggacgaggagttcgaggacggacgcatgaatggcaagaagtatccgagcggagtgtttgccggtcgccttcgaaaatacctttttaaagaacacttaggcctcctggaaagcgaaggttccagtcggtctgacctggacattaacgatcctgtttgtgagaagttttggcacggcacctggcgtaggatttcaatgcagaacacagagatttacgacgaggtgtttaagtgcatccccactgactttgtaaaaacctttgccagccttcgcaaataccaggaggagccgcctcttgccaaaaccgcccctgatctagctgccaacagagccaacgacattcagggttacttggtcgacctgccattggaatttctgaacaaggaggttctcacgccgcctggaactagtaaggagggcctaatccctacctctgtatggacatagtctgtcaaaagtgtctaagattttagaaagcttaaaaaccacttaccatttaccacccaccaaaagcactatctttaacgatgccaatgtcaagtcaaacattttgtaaatagtgtataatagccgtagataactctagatactttcaagtacatgtagctattccttaccaatagttaatttattttacaatgtttgtctatgtcctcaagtagttttaagatttttgttattattttgtatgatgttaaacagtattttagaccgatttacacaagtttattaaagtgatatgaagtgcaaatgaagaactgcaacat

SEQ ID NO: 42 - DNA, 1454 bp, Drosophila melanogaster
cgtggagtaagatgaacgcgaacagaaacttttgaattttgaagtaaaatttaaatttaagtgaaaggttcgaagtaattgttaattgaaaaataaatcaaatgcagtttagcctgatctgaggaaagaaagaacgagtgctaagctcaatgaactttcactctccgctctctccctatacatcgcgcttccagcgagaaatctctgctgatcgttctcatttccacgttcgcttggcgttttgatcagtttcgaatttgacttatagcgacgctggtcggagctctctcggcaaacaaaaaccgtgacaagcaaagatttgagcaaagatttgcccagaaggggtcttgctcgacaccaataataaaaatgccgcgatagaagtgtgtgtgccattgaccaacattttaatatttttaaattgtttcttgtgtgctcacgaaacgtgttcatgtggcgcctcaattgatttgatcttatttcaccaattatcaaagtgttaagtctgccatacgaaagcatttaaatgaagtaatacatatgtataaatgtacatatatacacttaacccactgctgaggtctccagctttcagtgccagtttggagtccacgacggagaagttaagccacaacttctggcatcagattaagagctaaacctatttcagcagtagccgcaagcatttgaacaccccactgacgatgtttaccggccggcgcactatggcggctacgttaacagaggctacgatgatttagacagttcctactactttgcccagtacgaggcgatggcagatgccggcaccgttggaggcgccttgccgccctacgcacttaccaactcggacgaagaacatggcagcggggaagaggacgcgtcggaggagaactccaacaatgaagagggagagggagtgttccgggactgcacagacgaagcggttgtcgagcatcataaccgctgcctgccagaatttcagttctctctagtcgattctgagtacgatgagaccctcgcttttcctgattctgtgaccattctatccaacgtgggcgacaagccggtgctggtggagcgcaaggagacggacgatgatgaggaggagttcgacgacgaggaaaacaacagtgtagtcctgagacacgaaataccatttactagcatatacgggccgagcgtcaagttcaactcgttccagcgcaaggttttcatcccgggccgtgagattcatgttcggatcgtcgatacggagcgtagcgtcactacacatctgctaaaccccaatctagatttacgacgaggtgtttaagtgcatccccactgactttgtaaaaacctttgccagccttcgcaaataccaggaggagccgcctcttgccaaaaccgcccctgatctagctgccaacagagccaacgacattcaggtactcttcccaattaatatttaa

SEQ ID NO: 43 - DNA, 4434 bp, Drosophila melanogaster
ctaggcgtggagtaagatgaacgcgaacagaaacttttgaattttgaagtaaaatttaaatttaagtgaaagctttcagtgccagtttggagtccacgacggagaagttaagccacaacttctggcatcagattaagagctaaacctatttcagcagtagccgcaagcatgtgagtgctttaaattcataaaaacacattaaattgaacaccccactgacgatgtttaccggccggcgcactatggcggctacgttaacagaggctacgatgatttagacagttcctactactttgcccagtacgaggcgatggcagatgccggcaccgttggaggcgccttgccgccctacgcacttaccaactcggacgaagaacatggcagcggggaagaggacgcgtcggaggagaactccaacaatgaagagggagagggagtgttccgggactgcacagacgaagcggttgtcgagcatcataaccgctgcctgccagaatttcagttctctctagtcgattctgagtacgatgagaccctcgcttttcctgattctgtgaccattctatccaacgtgggcgacaagccggtgctggtggagcgcaaggagacggacgatgatgaggaggagttcgacgacgaggaaaacaacagtgtagtcctgagacacgaaataccatttactagcatatacgggccgagcgtcaagttcaactcgttccagcgcaaggttttcatcccgggccgtgagattcatgttcggatcgtcgatacggagcgtagcgtcactacacatctgctaaaccccaatctgtacacaatcgagctgacccacggtcccttcaagtggacgatcaagcggcgatacaagcactttaactcgttgcaccagcagctcagctttttccgcacctcgctcaacattccttttcccagtcgcagtcacaaggagaagcgtaccactttgaaagccacagccagagagatggctgacgagtccactctaaaggaccttccttctcacaccaaggtcaaacaaactagcactccgctgagggctgaaggcagaagcagtaaaatcgcgggcagtaacgccaacaatgccatggctatgatcagtcccaatcacagctccattctggcgggtctaacaccacgacgcattcaaaagaagcgcaaaaaaaagaagaaacggaagctgccgcgattcccaaaccgtcctgagagtctggtcaccgtagagaatctgagcgtcagaataaaacagctggaggactacttgtacaacctgctgaacatcagcttgtaccgatctcaccatgaaacgctaaacttcgttgaagtgtctaatgtgtcctttgttccgggaatgggaattaagggcaaggaaggcgtgattttaaagcgaactggatcaacgagaccagggcaagcaggatgcaatttttttgggtgctttcaaaagaactgctgtgtgcgctgcaactacttttgctccgacgtagtttgcggcacgtggcggaaccgatggtttttcgtaaaagagacctgcttcggctacatccgtccaacagacggaagcatccgggcagtgatcctctttgatcagggcttcgacgtttccacgggtatctatcagacgggcatgcgcaagggcttgcaggtactgacgaacaaccgtcacattgtgctcaagtgctggacacggcgtaagtgtaaagagtggatgcaatacctcaagaacacggccaactcgtatgcgcgcgacttcaccctgcccaatccgcacatgtccttcgctccgatgcgcgccaacactcatgccacgtgtcccgagatatacatgaagcgacccgcactcgacggagactactggcgattggacaagatcctgttgcgcaaggccgaacagggagtgcgcgtctttgtgctgctctacaaggaggttgaaatggcacttggcataaacagctactacagcaagtccacgctggccaagcatgaaaacatcaaggtcatgcgtcatccggaccatgctagaggaggtattctgctttgggcacatcacgaaaagatcgtcgtaatcgaccaaacctatgcgtttatgggaggtattgatttgtgctatggacgttgggatgatcaccaccatcggctaacggatctgggtagcatatctacgtcatctttttctggcagcacgcgtcgaacgccaagtttgtacttcaccaaagacgacacggactcagctttcggatcacgtaagtcctcgcgaaacgctcactacgatacctccgccaaggaaaggccaccgtccccacccccggatgagcccaatactagcatagagttgaaaactcttaagcctggtgatcgactgcttataccgtctacgctcgtttcgagtccgggtgaaactcccgcagaatcgggaatcgctttagaagggatgaaactcaacacccctgaaatggagcgtaagaacgtactcgatcgcctgaagaacaacgcgatgaagggcgcccgtatgggcaaggactttatgcaccgtctaacagctactgagacggaggaaaaatctgcggaggtgtacactatcgagtccgaggaagctacggaccacgaagtcaaccttaacatggcttcaggtgggcaggaagtggcgattaccactagcagtacacaaatactcagtgagttctgcggccaggccaagtactggttcggcaaggattactccaactttatacttaaagactggatgaacctaaactcgccgttcgtggatatcatagatcgaacaacaacaccgcggatgccatggcacgacgtgggtctgtgtgtggtgggtacttccgctagggatgtggcccgccacttcattcagcgctggaatgccatgaagctggagaaactacgcgataacacgagattcccctatttgatgccaaaaagctatcaccaagtgaggctcaatccgaacattcagcaaaaccgtcagcaacgggtcacgtgccagctacttcgaagcgtctctgcctggagctgcggctttatagaggcggatcttgtggagcaaagcatccacgatgcctacatccagacgatcaccaaggcgcagcactacgtgtacatcgaaaaccaattttttatcactatgcagttaggcatgggtgtgccaggtgcttataacaatgtgcggaatcaaatcggggaaacactctttaaacggatcgttagagcgcacaagtatgaaaccaaaatacttatcctgattctagcagatctaatgttcagctcttctagggaacggaagcctttccgagtttatgtgattatgccgctcctaccgggctttgagggtgatgtcggtggcagtactgggatagcagtcagagcaattacacactggaactatgcgtccatttccaggggacgcacatcaattttgacccgcctgcaggaggcgggtattgccaatccggaaaactatatctcattccacagcctgcgcaaccattcttttttgaataacacacccataacagagttgatatatgtccactcaaagctcttgatagccgacgatcgcgttgtaatctgcggttcggcaaacattaacgatcgctctatgatcggaaagcgggactccgagatagcggctattctaatggacgaggagttcgaggacggacgcatgaatggcaagaagtatccgagcggagtgtttgccggtcgccttcgaaaatacctttttaaagaacacttaggcctcctggaaagcgaaggttccagtcggtctgacctggacattaacgatcctgtttgtgagaagttttggcacggcacctggcgtaggatttcaatgcagaacacagagatttacgacgaggtgtttaagtgcatccccactgactttgtaaaaacctttgccagccttcgcaaataccaggaggagccgcctcttgccaaaaccgcccctgatctagctgccaacagagccaacgacattcagggttacttggtcgacctgccattggaatttctgaacaaggaggttctcacgccgcctggaactagtaaggagggcctaatccctacctctgtatggacatagtctgtcaaaagtgtctaagattttagaaagcttaaaaaccacttaccatttaccacccaccaaaagcactatctttaacgatgccaatgtcaagtcaaacattttgtaaatagtgtataatagccgtagataactctagatactttcaagtacatgtagctattccttaccaatagttaatttattttacaatgtttgtctatgtcctcaagtagttttaagatttttgttattattttgtatgatgttaaacagtattttagaccgatttacacaagtttattaaagtgatatgaagtgcaaatgaagaactgcaacat

SEQ ID NO: 44 - protein, 1267 aa, Drosophila melanogaster
MADAGTVGGALPPYALTNSDEEHGSGEEDASEENSNNEEGEGVFRDCTDEAVVEHHNRCLPEFQFSLVDSEYDETLAFPDSVTILSNVGDKPVLVERKETDDDEEEFDDEENNSVVLRHEIPFTSIYGPSVKFNSFQRKVFIPGREIHVRIVDTERSVTTHLLNPNLYTIELTHGPFKWTIKRRYKHFNSLHQQLSFFRTSLNIPFPSRSHKEKRTTLKATAREMADESTLKDLPSHTKVKQTSTPLRAEGRSSKIAGSNANNAMAMISPNHSSILAGLTPRRIQKKRKKKKKRKLPRFPNRPESLVTVENLSVRIKQLEDYLYNLLNISLYRSHHETLNFVEVSNVSFVPGMGIKGKEGVILKRTGSTRPGQAGCNFFGCFQKNCCVRCNYFCSDVVCGTWRNRWFFVKETCFGYIRPTDGSIRAVILFDQGFDVSTGIYQTGMRKGLQVLTNNRHIVLKCWTRRKCKEWMQYLKNTANSYARDFTLPNPHMSFAPMRANTHATCPEIYMKRPALDGDYWRLDKILLRKAEQGVRVFVLLYKEVEMALGINSYYSKSTLAKHENIKVMRHPDHARGGILLWAHHEKIVVIDQTYAFMGGIDLCYGRWDDHHHRLTDLGSISTSSFSGSTRRTPSLYFTKDDTDSAFGSRKSSRNAHYDTSAKERPPSPPPDEPNTSIELKTLKPGDRLLIPSTLVSSPGETPAESGIALEGMKLNTPEMERKNVLDRLKNNAMKGARMGKDFMHRLTATETEEKSAEVYTIESEEATDHEVNLNMASGGQEVAITTSSTQILSEFCGQAKYWFGKDYSNFILKDWMNLNSPFVDIIDRTTTPRMPWHDVGLCVVGTSARDVARHFIQRWNAMKLEKLRDNTRFPYLMPKSYHQVRLNPNIQQNRQQRVTCQLLRSVSAWSCGFIEADLVEQSIHDAYIQTITKAQHYVYIENQFFITMQLGMGVPGAYNNVRNQIGETLFKRIVRAHKYETKILILILADLMFSSSRERKPFRVYVIMPLLPGFEGDVGGSTGIAVRAITHWNYASISRGRTSILTRLQEAGIANPENYISFHSLRNHSFLNNTPITELIYVHSKLLIADDRVVICGSANINDRSMIGKRDSEIAAILMDEEFEDGRMNGKKYPSGVFAGRLRKYLFKEHLGLLESEGSSRSDLDINDPVCEKFWHGTWRRISMQNTEIYDEVFKCIPTDFVKTFASLRKYQEEPPLAKTAPDLAANRANDIQGYLVDLPLEFLNKEVLTPPGTSKEGLIPTSVWT

SEQ ID NO: 45 - protein, 173 aa, Drosophila melanogaster
MADAGTVGGALPPYALTNSDEEHGSGEEDASEENSNNEEGEGVFRDCTDEAVVEHHNRCLPEFQFSLVDSEYDETLAFPDSVTILSNVGDKPVLVERKETDDDEEEFDDEENNSVVLRHEIPFTSIYGPSVKFNSFQRKVFIPGREIHVRIVDTERSVTTHLLNPNLDLRRGV

SEQ ID NO: 46 - protein, 1267 aa, Drosophila melanogaster; identical to SEQ ID NO: 44

SEQ ID NO: 47 - DNA, 4669 bp, Drosophila melanogaster
attcggacttcaagcaagagtccgctttgccgagatataaaattaataacgagatcgagtaccagctgcacacagtggaaatgagaaaagaccgacggcaaaacaatagaacacacccgattagtcgtgcgtaaccgattgactaaagcacggggcagagtcgatagaaaaaatatacagttttaaagcgcttaattaggtgttttctaacgttggtacatctcaacggagtggataacgagaagagtgaagggaggagaaccattggcaagaacatactcaccaaaatggataatttcgataaaatatttaacagtgaaagtgaaaacggttgaagttttaaaataaaaagaaataactcgtacgccaaagaatgcaatattaagtgcagccttgggttaatgcctatcaggcattttacattgactgccattcgagcgtattaattgaaaatcttatgagggagcaaggctctcgagtaagtttataaactgtgtccgaagtagcattaaatatcaaaaagtgaaaatacaagacaaatatttgaaaagtgtgcctgcataaaactgaattaaaagtaagggccgattgctctttaaaaaatagggttagtctatggcgtgcattcactagagaaatatggaaaagcggcttagcgacagtcccggagattgtcgcgtaacgagatccaccatgacgcccactctgcgcctggatcagacttccaggcaagagcctctgccccagcagccggataatggcccagctgcagcgcctggaaagtctaagtcccccactccgttgcccggaaaatcacaggccgcccagcatcaccagttccgcgctccgcagcagcagcagggcccgaaaaaccggaacaaggcctggatctacgggctcctcggtcatagccgcgactctccttcccactgcggcgtcggctcacaaggcggatctcgagaacatccagaatatccataacaaaaatctgactgccggcggtggagtcaaccatcatgggaacgccggaacagcgcatcacggcggtggcggtggtgccggcgcccatcatgccgcagcgggtggccaccatcaccatcacaacactaggctggcgcaaaacgctgccgctggtggagccagcggaggaggaaccattcaaatgcataagaaaatgttgagaggtcaccatcaccacgtgctgtgcgccggaaacaatgctaaccacacgtgctgcctggtgacgggatgcaacggcagctctatcggcggagtaggcgtggcaggaagcggaggagctaccgcctcagcggggggcggcggagcgtcgtgcaaggaagcgcagagctgcaaggacaccagctcgctgagcggcaacagcagcattgcgggcagcgctggagcgggcaacgcagtccactattgctgcggccgctccaagttctttttgccggagaagaggttacgcaaggaggtgattgtaccgcccaccaagtttctgctgggcggcaacatctccgatccactcaaccttaattcgctgcagaacgagaacacctcgaatgcctcctccaccaacaacacgccggcgaccacgccccgccagtcgcccatcactacgcctccgaaagtggaggtgatcataccgcctaacatccacgatccgctccacctgctggaccccgttgattccatggagtacgagaagcagctgacgtcgccgatgaagcgcgctgggccaggaggtgggatgctccaccaccggcagcaccactatcgcacgcgaaagaaccgaaagcgacggcgctttgactccaacaacacctcgcatgccggcgatgaaggaggggtcggaagcgagctgaccgacgaaccgccgctgcccgcagccacctcttcgctggcggcgtcgccggtggcagcgccccttaacgtaggcggcagcttgctgctgagcgaatccgctgccccagccccgggcgaaacggcggaaatgggacaacagcaggagcaggcgcatgtgcactctccgcagtcggcatcaacgacgacgaccgccgctgagatgcccaccccgacgccaaccagtgcagcggcagcgactgcgaccgcggagcacaaggagcagtcggctccagcgccgactgcaacgtcgtcgccacagcggcagcagcaacatgtggccgctgcagccgaggaactccccactccggaaacttccgctgctgctgagacgccggcagaggagatgctccttagctgttcggccacgtcggcctcactggtggcttcgacgctggcagagcgaagggccagccgagacctgcgtctggacttgtcgagcacgtgctacggcgttggcggcacgggtctgagcttcggcggcagcatctcatccagcgtcggcagtagctttggtggcggtgggaggaagaggaaaatcagcgagagcagcacttcgcaaaagagcaagaaatttcatcgtcacgatgccatggacaagattgtcagtccagtggttccgcagccaggagcctggaagagaccgccacgcatccttcagcccagcggagctaggaagcccagcacccgccgctctacgtccgtcagcgaatcggaactactcagtcccgtggaagagcagccgcccaaacagctgcccctcatcggggtggagataccccgtgatgacacgccggatttgccggatcatgggctaggcagtccgctgagcactacttcgggggccacctcgcacacggccggcgagcaggattctctggccggtgtggacatcagcatgggggatacattggggtctggggtcgtgggcaaggcaccgctgactagtagtcttatgctggaaccggctaaaattccaccaattaaaatgctgccaaagtttcgggccgatggattaaagtaccggtacggaaacttcgaccgctacgtggactttcggcagatgaacgagtttcgagacgtgcgcttgcaggttttccagcgtcacgtggaactgttcgagaacaaggacattctagacattggctgcaatgttggccacatgaccattacggtggccagacatctggcaccaaaaacaattgtcggtattgacattgaccgggagcttgttgcacgagcaaggagaaatctgtcgatctttgtgcgtattcccaaggaggaaaagctgctggaggtcaaagcagagccaacggttgatgcaaaagcgaatatcgcggtgaaggatgagacatctggagcagctcacaagaaaacgagacggggcaagaggagacgcaaggtgcatcaaggaatacatcatcatcaccatcatcatcatgatttagaacagctgcaacagcaacagaagttgaactcgttgcttgttaagccacacgaattctttcccatttctttccctctgacctacggacgtattccccgtattttatcatcgagtaaatcgcccaacatgctcgggaacaagaatcagtttccggcaaacgtcttcttcagacacaccaactatgttctcaaggacgagtcattgatggccagcgatacccagcaatacgatctcatactgtgtctctcagttactaagtggatccatctcaactttggagacaacggcttgaagatggcatttaagcgcatgttcaaccagctgcgacccggtggaaaacttatacttgaagcccaaaactgggccagctacaagaagaaaaagaacctaacgccggaaatatataacaactacaagcagatcgagttctttccgaacaagtttcacgaatacttgcttagttcggaggtaggattcagtcacagctatacgcttggcgtgcctcgtcacatgaacaagggcttctgccgacccatacagttgtatgcaaagggcgattataccccgaatcacgttcgttggagcgatgcatattatccccagacgccatatgaagcatatcggggcatttacgccaccctgcccgttcaccggatgggcggcggtgggagcagcgcgggcggtagcaatagtgggcatgctcaaatgctgcaccttagcagctccagtcggtcgcagaactatgatacgccgcactacgcaggtagcgcatcgggatcggccagctgcagacagactccaatgtaccagcccacctacaacccgttggaaacggactcataccagccaagctacgacatggaatatctcaaccacatgtacgtgttcgcctcgccgctttaccagaccgtctggtcacctccagcctcgctgcgcaaaagcagctcgcatactccggtatttggaagcgtgcgcgatgcagagctggacggtgatggcagtggtggtgggggcagtggtggcggaagctaccaccgccacgtctatccgccaaacgacgacacttgttcgcccaacgcaaacgcttgtaatgcgtttaactcgattcgggacgcggacacagacgattctaaccagctgcctgggggaagtcgacgacatgtgtatgcaaccaactgcggagagagctcctcatcgccgcaggtaaatcaccacgatgcggttggcgaatttgtggacggtcttatggacgacgaacagaagtcttcaacaggcggaggaactggtggcgcagcttattgtgatctgtcggatgcctag

SEQ ID NO: 48 - protein, 113 aa, Drosophila melanogaster
MEKRLSDSPGDCRVTRSTMTPTLRLDQTSRQEPLPQQPDNGPAAAPGKSKSPTPLPGKSQAAQHHQFRAPQQQQGPKNRNKAWIYGLLGHSRDSPSHCGVGSQGGSREHPEYP

SEQ ID NO: 49 - DNA, 1023 bp, Drosophila melanogaster
atgggcaacgtaatggcgtccaccgcagacgctgagtcctctcgtgggcgtggacatctgtccgccggactacgcttgccggaggcaccgcagtattccggcggagtgccgccacagatggtggaggccttaaaggcggaagctaaaaagcccgaattgacaaatcccggaactcttgaggaactgcacagtcgctgtcgcgacatccaggccaacaccttcgaaggcgccaaaattatggtgaacaagggtctgagcaaccacttccaagtgacccacaccattaacatgaattcggctggtccaagtggctatcgttttggagctacctacgtgggtaccaaacaatacgggccgactgaagcctttccggttcttcttggcgagatcgatccgatgggcaatcttaatgcaaacgttatccatcaactgacctctcgtttgaggtgcaagtttgcctcgcagttccaggactcaaagctggtgggcacccagctgacgggggactatcgcggcagagactacacgctgaccctgacaatgggcaatccggggttttttacgagttccggagtatttgtgtgccagtacttgcagtccgtcaccaaacgtctggcgctaggatcggagttcgcctatcactacgggccgaatgtgcccggacgccaagtggctgtattatcagcggtgggacgttacgccttcggtgataccgtgtggtcttgcactttgggacccgccggattccaccttagttactaccagaaggccagtgatcagctacagatcggagtcgaggtggaaacgaatatccgccagcaagagtcgacggccacggtggcataccagattgatctgcccaaggcagacctagtcttccgcggcagtctcgattccaattggcttatttccggagtccttgagaaaagactgcagccgctaccgttctcgttggccattagcggtcgtatgaatcaccaaaaaaatagttttcggctgggatgtggcctcatgataggatga

SEQ ID NO: 50 - protein, 340 aa, Drosophila melanogaster
MGNVMASTADAESSRGRGHLSAGLRLPEAPQYSGGVPPQMVEALKAEAKKPELTNPGTLEELHSRCRDIQANTFEGAKIMVNKGLSNHFQVTHTINMNSAGPSGYRFGATYVGTKQYGPTEAFPVLLGEIDPMGNLNANVIHQLTSRLRCKFASQFQDSKLVGTQLTGDYRGRDYTLTLTMGNPGFFTSSGVFVCQYLQSVTKRLALGSEFAYHYGPNVPGRQVAVLSAVGRYAFGDTVWSCTLGPAGFHLSYYQKASDQLQIGVEVETNIRQQESTATVAYQIDLPKADLVFRGSLDSNWLISGVLEKRLQPLPFSLAISGRMNHQKNSFRLGCGLMIG

SEQ ID NO: 51 - DNA, 3066 bp, Drosophila melanogaster
aaagaagaagagcgaagaaaacagataactccaatgtttgcaaaacaatttgattagtcttgaaggaatccgctttaggctcttaggaacccgctttatagcgagcacaggcacgcactggcacacacagcaagcaaagagtgacaacattatccgtgaagtggacatatggccaacaagaacatgcgtaacaccacaaccaaagtggaggccctgattgagagctgtcgcagcgagggcaagtggcaccgggtcatcgagctaacggatgaactgaagaccgggtccccgcacaatgagtgcctggccaactttctggtgggggaagctcgtctggagagttacctggaggaaaacgctctcgcgtcagactcaaattttggtcgcgccaagtctggattggcggaggcccggcgtttccttcacttggctttgggtgagagtggccagaaggcgggcatcgccctggacgcctatttgctgctggccaagctgtgctttgcctgcggcgagtatgagcagagtctagacaatttcgtcaaggcagaactcaacacgcttgccgagaaggagctgacccttcgcagcctgaagatccttgcggaatcgtatgccatcaagggattgtgtctggagcagcagactacgaagccgtcatctaagtttaagaaggccgaaaaggacacggaaatgattagctgttttgagcgcgcatctgatctggggctgctctatctgcaggaatacgatctcgttagtggaagcagtggctcgtccaacaactcgacagctggttctacgttgaatgtaaacgcctctactgtgcagccgtcgagcagcagttttgcaatcagcagtacaataccggcgagtggtccaagtggactggaaatgaaccgcaggatgggcgccatcctagagaccgccctgcaacgggcacccatagtgcttattaagacggaaaagcttcaagaggccgttgaacggtatcgaatcatgctaaacgccatcgaaacgagggctactcaatcgttgcgcctcacgctggcccgccagctagctgaggttcttttgagaggggtctcgggcacgatttactcgcctccttttaccggaaaatctggaggtgggacgctgcgaggaggatcctccaagaaactttggaaaccgcgtaaatacgcagcccgccagcagtttaaccctcggaaccagcaggaagaggtaattctgttgctactcatagccgaggcactggctgtgagggatacagttttgtcgcagagtccagagtttagacaggcccgtcagcatgctatgggcaacgttacggccgtctatgacctcctgacgttggctactgtgcgctgggggctcgtccagctattaaatgagtcctttgagaaggcgctaaagtttagctttggtgaacagcatgtgtggcggcagtacggcttaagtttgatggcagccgaaaagcactcgcacgctttaagggtcttgcaagaatcaatgaagttgactcctagtgatcctttgccatgtctgttggcttctcgcctttgctacgagagtctggagacggtaaagcaaggtctggactatgctcagcaagcgctgaagcgcgaagtaaagggcttgcgaccatcgcgaagccaactctttgtgggcatcggtcaccaacagctagccatccagtcaaatcttaaaagcgagcgagatgcttgtcacaagctggctttggacgccctggagcgcgctgtgcagtttgatgggaacgaccacctggcggaatactacttgtcgttgcagtacgcacttctgggacagctggcggaggcattggttcatatccgtttcgcgctggcgttgcgtatggaacatgcgccatgtctacacctgttcgcactgttgctgacatcgtcgcgccgacctcgtgaagctttgggagttgttgaggatgctttacacgagtttcccgataacctgcagctactgcacgttaaggcacatcttcagctgcatctagaggacgcggagacggcgttgggcactgtgcagcacatgctggccgtgtggcgggacgtttacgaggcccagctagcgggagaggaggaaaagcactcagacaccaagagtggtgttcacttggcacattcctcacagatgtccgacaaggattcaaattctgtgtacgcggcttcattggctgcagtctcccgcgttgaacaggctctgagtgaagcagcaagctcattgagctcatttacgcagcgtcctggaccccgacgaccctggatgctacagattgaaatatggcttctgctggctgatgtctatctgcggattgatcagccgaacgaggcactcaactgcatacacgaagcctcacagatttatccgctttcgcatcagattatgtttatgcgtggccaggtgcatgtctatttggagcaatggtttgacgccaagcaatgtttcctgaacgccgtggccgccaacccaaatcacacagaggctttgcgtgcgcttggagaggcgcatttggtactgggcgagccgaggttggctgaaaaaatgctaaaagatgcggccaaactggatccgagctgtccaaaaatttggttcgcactgggaaaggtgatggagatcctgggcgatttccatgcctcagccgattgcttcgccacgtcgctgcagttagagccatcatgtccggtgctaccttttacttctatacctttggtgtttgaataggaacactttcgtgtctaattcgaagcttgacaaacctcaaagtcaacagcaatactagaattatacttcctaattccttcagtgtaaaaattgttgtatcgcagttttggagcaacaaatgtttaaatattgtttgtgtgtaaattattaccaagaattgttcgagcttggctgtattatgtgaatgaaccattctgctatcttccttaatcacccacttttaaggagatggttcggttaaatttattactctattaggtgttgttaattacatacaaaattggttattatataaatatacagtatttcgtg

SEQ ID NO: 52 - protein, 861 aa, Drosophila melanogaster
MANKNMRNTTTKVEALIESCRSEGKWHRVIELTDELKTGSPHNECLANFLVGEARLESYLEENALASDSNFGRAKSGLAEARRFLHLALGESGQKAGIALDAYLLLAKLCFACGEYEQSLDNFVKAELNTLAEKELTLRSLKILAESYAIKGLCLEQQTTKPSSKFKKAEKDTEMISCFERASDLGLLYLQEYDLVSGSSGSSNNSTAGSTLNVNASTVQPSSSSFAISSTIPASGPSGLEMNRRMGAILETALQRAPIVLIKTEKLQEAVERYRIMLNAIETRATQSLRLTLARQLAEVLLRGVSGTIYSPPFTGKSGGGTLRGGSSKKLWKPRKYAARQQFNPRNQQEEVILLLLIAEALAVRDTVLSQSPEFRQARQHAMGNVTAVYDLLTLATVRWGLVQLLNESFEKALKFSFGEQHVWRQYGLSLMAAEKHSHALRVLQESMKLTPSDPLPCLLASRLCYESLETVKQGLDYAQQALKREVKGLRPSRSQLFVGIGHQQLAIQSNLKSERDACHKLALDALERAVQFDGNDHLAEYYLSLQYALLGQLAEALVHIRFALALRMEHAPCLHLFALLLTSSRRPREALGVVEDALHEFPDNLQLLHVKAHLQLHLEDAETALGTVQHMLAVWRDVYEAQLAGEEEKHSDTKSGVHLAHSSQMSDKDSNSVYAASLAAVSRVEQALSEAASSLSSFTQRPGPRRPWMLQIEIWLLLADVYLRIDQPNEALNCIHEASQIYPLSHQIMFMRGQVHVYLEQWFDAKQCFLNAVAANPNHTEALRALGEAHLVLGEPRLAEKMLKDAAKLDPSCPKIWFALGKVMEILGDFHASADCFATSLQLEPSCPVLPFTSIPLVFE

SEQ ID NO: 53 - DNA, 1852 bp, Drosophila melanogaster
cccgtcattgttgtcaataaacaaaagctggctcgcagtcacagcgactaggaggttaacctgacttacccgtttcggttttgaattcggtttcattgtcgctttcttgaacttgcgagcaccgcgtggccaatcttgcagaatgaatttcgggtgtgcaccggaaacaaccgacagtgaaataactactggccattcacaaatccataaagcacagtgtaacactttgtaacggatcgcaaatccaaccaccccacgcaaatcaaagcttaatgccaaaagtcatacaagtgcaattgatttaaatgaatttttgtttaatttgtataaagtcgtaaaatgcaagttcatggcgatatatatataccaatttgtgcaaactgatggggaaaatcggaatggtaacaccatttaagggcagtgcggctaaaaattgctgacgagcaactttcagattaatgcaattcaaattggctttccgtcgactaacaataagccgttgggaatagcagatgtgtgctaaagcagatccagagttctggcagcagttaacaccaattaaaagcgtcgttatagcaatagtgcagcaaacatagagggaaaatgtcagtcactcagccaaaggatacggcattaaagaccaaggagtcggcagctgaagtagcagcccctctggccccactctctgtcaaaacagcaggagcaacgggacggaaaactttaacctccagcgcggctttgtcactgtttgatcagctgaaaaatagcgtcaatacaaacagtttgacaattggcgccggcgtcggcaacaacagtagcccagaagccacaccacctataacagcaccagccagtacaaccaccgcctccccgatacttactcccaaaagcccaccacccacaccacccatcaacaaaagcccgtctctgtcctccaatattgaactgaagcccccggccaaacccgctcggccctttacctcgcccagcactattggaatcgtgcagggtaccaaacggggggtgggcggagtttttggcgggtttggagcccaagccgccaaattggatataaacgcattgcgatctcagctctaccagggcgccaggaagactgcaacaacatctcgagtgggagtcggcaaaacaacaacggtggcaacagccccaagaacaactggaggagaacgtggcacaaaggggtccaagaagagatgtctagatcggtacgactcgtcggagtcatcagacaggtgagtgcatgtcgtgggcacactactgaagcatgcagtgcggctgtccctgcatcttggctactgtttaatggccttcggtggggcagtggtagctggacgcacccattgtcaatatcaacaggtaacgccacgaaaaaccactgaggtatttgcatttcccattattattactgctgctgcagctgttgcacctcggtccaactcctcgccctggagtgctaatggccatcagtctgagctggtcagaatatgcaccctgggagcgtgtgaaattttctgttgccgttttcggttccctggtctttgttctgttgcggagcaatttgttgctggccacgtgaaacaaggcccggcaaaagggtgttttcagggaaatgagcagcgcaatggcaatcgcagaggcaaaaggccaggggcaaattggtaattaagttgtctcccgaatgaggaactccgaacggggaggagccactcctggcccggtggaagcttcgacttccctaatgaagttatttggtccaggaaaatttctttaattgtaaaagaatcactattttaataaaagaaactggtgatagtgttaatctatattataa

SEQ ID NO: 54 - protein, 217 aa, Drosophila melanogaster
MSVTQPKDTALKTKESAAEVAAPLAPLSVKTAGATGRKTLTSSAALSLFDQLKNSVNTNSLTIGAGVGNNSSPEATPPITAPASTTTASPILTPKSPPPTPPINKSPSLSSNIELKPPAKPARPFTSPSTIGIVQGTKRGVGGVFGGFGAQAAKLDINALRSQLYQGARKTATTSRVGVGKTTTVATAPRTTGGERGTKGSKKRCLDRYDSSESSDR

SEQ ID NO: 55 - DNA, 3110 bp, Drosophila melanogaster
atttgtgagcacacactttagtttttcgttaggaacgggacgttcgttctgttgcgcaccaaattttttcggacccaatgcaaatgcaaacgcttttgcggcgtgtgtagtgcattcaaaattaccagatacccaacgggatccaaagttcccagagcagtggcaccggaatcgatgcgaccagcagtcagcggaagcgtaagaaattcgcgcctaggtggacaaaaatcgatctgtgacgcggtttaaaccaaggctgcacgacacttcgaggacttttatgtgattattactatgaaattggatgaaatagttgcatggtaccagaagagaatcggcacctatgacaagcaagaatgggaaaagaccgtcgaacagaggatattggacggcttcaatagtgtcaatttaaaaaacaccaagctgaagacggagctaatcgatgtggacttggtgcgaggttccacgttccctaaggccaagcccaagcagtcgttactcactgtgatacgcctggccattctgcgctatgtcctgctgcccctctatgcccagtggtgggtcaagcagaccacgccaaacgccttcggcttcatccttgtgctttacctcacacagttaaccaactgggctatctacgtgcttcacagcagtcgcatagtgccccttgactatgagaagccgccaaatggaaccctgcttcaggcagaggcagatggagatgcctccgataaggatgcagataaggagtccgaggaacatgccgccctcctcagtgccctgcttattccgtgcgccctaagcttgctgatcagtctcatccactcacaaattgtagccactaacaccgcctcgggtgtctctggcgggagtagcaagaacaagctgcgtcgcatatctgcaagctacttaagcgacaaagcagcaaccagggagaaccgggtgcgacgtcgcaagaagattgtgcgagttcgacaagtggaggctgacttgtcccaggccagcagtaacatatcacttccaaacagaagaaccgcaaccagcacaatcgaagttcttcccagaccggtcacgcctttgccttcaccaacagttacctgtgccacggtgccagaccccaccacgccgactacgccttcgccatctgttatcaggcggagcaccaacgaggagacctatttgacaacgactgcaatcagcccactaacgcaaccgctggcagccatagacgcatgctacgatctcagcagaaaggcagggggagctgctcccgaaagccccaaaaagcgcaacgtcaactggcacacgcctattcagatatacgctacctacgagctgggcgaagagccgtgctccagcagaaaagtcgcagaagaaagtgcgcctgagtcggttggagaaagattgtgttccgtcaagccagactaccagacgcgtcgaaacatcggggaggacgatggcttcgagagtctgaatggaaagagctcaagtggagaggacaacaaccattcgcctttgccaaacgcggtggctgttgcggctccaccagctcctgttcagaccaatcagttgcgtctgcgattaaacacaacaaacggtgtgaccgccagtgcttctccaaccgagaagaaaccccagtcgcgcggcaatgaatcctcaacgagttgcgccgaatcggatgagtgcgatgatgccgacattatgtccagtcccgcctcgggctgtaaccaagagtgcaccacttctgccaccgactggctgggggtgacgacaaatagcgaagactgcagttacacctctgatctggatcactctgacgggggcttgaagcacacggcctttagcgacgaagatcctggagagctggacatcacccctaccactatactaaatccacatagcagcctcgaccgtattagctgcaccatttgggatcagcgagatgccaaaaaggcgcagctttccgtgctggagatcgcgtcttgcataatcgaacgcgtggactcaatgggcgaggccaacgactacatctacataggcgtggtcttctctttcctgctcacattgattcccatcttctgccgtctctgcgaggtatgttgccgggaaggttttggtggaggagactacttattactggtcaaatgcactcaggtcacactcgggagcgatgcagagaaggccagtgagattagctactttaacatgccgcagctgctgtgggagaagtcatcggcatcgctcttcaccctgctgggccttgccttcggcgacagccagtgggagcgcatggtattggctctgggctttgtccaacgcctttgcctgaccctcatactgttcataatattcgccgttgcagagcgcaccttcaagcaacgcttcctttacgccaaactcttctcccacctaacttcatcacgtagggctcgaaagtcaaatcttccccacttccgtttgaacaaggtgcgtaacatcaagacctggctgagcgtgaggtcgtatttgaagaaacgcggaccccagcgatcggtggatatcatcgtttccgccgccttcatagtaaccctcctgttgctggccttcctcagcgtcgagtggctgaaggattcggctcatctgcacacacaccttaccttggaggccctaatctggtccataacaatcggtatctttctgctgcgcttcatgaccctaggtcagaagatacagcacaagtaccgcagtgtgtcggtgctgattacggagcaaattaacttgtatctgcagatcgagcagaagccaaagaaaaaggacgagctgatggtgtcgaacagcgtgctcaagctggccgccgatctgctaaaggaactcgaaacgccattcaagctctctggccttagtgccaatccatatctattcacaaccatcaaggtggtaatcctgtcggccctatcgggcgtgcttagcgaagttttaggctttaaactgaagctgcataaaatcaagatcaagtaacctatgcaaggcgcagacccatcatatttttgtagtacaactttttagaaacgctttaagagaaatctaacactacactctaaattagttaagtgaataaatttaagcgagcc

SEQ ID NO: 56 - protein, 900 aa, Drosophila melanogaster
MKLDEIVAWYQKRIGTYDKQEWEKTVEQRILDGFNSVNLKNTKLKTELIDVDLVRGSTFPKAKPKQSLLTVIRLAILRYVLLPLYAQWWVKQTTPNAFGFILVLYLTQLTNWAIYVLHSSRIVPLDYEKPPNGTLLQAEADGDASDKDADKESEEHAALLSALLIPCALSLLISLIHSQIVATNTASGVSGGSSKNKLRRISASYLSDKAATRENRVRRRKKIVRVRQVEADLSQASSNISLPNRRTATSTIEVLPRPVTPLPSPTVTCATVPDPTTPTTPSPSVIRRSTNEETYLTTTAISPLTQPLAAIDACYDLSRKAGGAAPESPKKRNVNWHTPIQIYATYELGEEPCSSRKVAEESAPESVGERLCSVKPDYQTRRNIGEDDGFESLNGKSSSGEDNNHSPLPNAVAVAAPPAPVQTNQLRLRLNTTNGVTASASPTEKKPQSRGNESSTSCAESDECDDADIMSSPASGCNQECTTSATDWLGVTTNSEDCSYTSDLDHSDGGLKHTAFSDEDPGELDITPTTILNPHSSLDRISCTIWDQRDAKKAQLSVLEIASCIIERVDSMGEANDYIYIGVVFSFLLTLIPIFCRLCEVCCREGFGGGDYLLLVKCTQVTLGSDAEKASEISYFNMPQLLWEKSSASLFTLLGLAFGDSQWERMVLALGFVQRLCLTLILFIIFAVAERTFKQRFLYAKLFSHLTSSRRARKSNLPHFRLNKVRNIKTWLSVRSYLKKRGPQRSVDIIVSAAFIVTLLLLAFLSVEWLKDSAHLHTHLTLEALIWSITIGIFLLRFMTLGQKIQHKYRSVSVLITEQINLYLQIEQKPKKKDELMVSNSVLKLAADLLKELETPFKLSGLSANPYLFTTIKVVILSALSGVLSEVLGFKLKLHKIKIK

SEQ ID NO: 57 - DNA, 3761 bp, Drosophila melanogaster
agcaacaagtgaacggaagaatccgagcagtgaagaatcagaaagaccgaggaaacactcgagaactctttaataacattgtgaaccaaaaaaccagaaacagccactgaaaatacacggaaagcagagtgattcgccatagttttgctagtgttttcaagggcacccatcatacagctgtgctgcaaattttgtgccagttgccgtatctcagaagcagcgggtccaaagtaccgccaaatacgccgtagagccgattccttcgccaataagcggcgcatttgaccgcctgcccataaacatggccgccatataaccacaaacggtgaacgcaaccacacaaagtcggagctttgcgattagacaagtagatagcagcggggagttcaaggagagatccccgccagcaaggaaatccattttgaagggagaccagccgcagcagaccaaagatgaatagcctggcgcgggttttcagcaacttccgcgacttctacaacgacatcaatgccgccaccctcacgggagccatcgatgtgatcgtggtggagcagcgcgatggcgagttccagtgctcgcccttccacgtccggttcggcaaactgggagtgctcaggagtcgggagaaggtggtggacattgagatcaatggcgtaccggtcgacatacagatgaagctgggcgattctggcgaggccttctttgtggaggagtgcctggaggatgaggacgaggagctgccagccaacctggccacctcgcccatacccaacagcttcttggcgtctcgggacaaggccaacgacaccatggaggacatcagtggagtggtgacagataagcacaccgacaacacactggagcgtcgcaacctaagcgaaaagctcaaggagttcaccacgcagaagatccggcaggagtgggccgagcacgaagagctgtttcagggcgagaagaagccggcggactcggactcgctggacaaccaaagcaaagcttcaaacgaagctgagacggagaaggcaattccggcggtcattgaagacacggaaaaagaaaaggatcagatcaaaccagacgttaacctcaccacggtcacaaccagcgaagccaccaaggaggtgtccaagagcaaaaccaagaagcggcgcaagaagtcgcaaatgaagaagaatgcccagcgcaagaactcttcaagcagctcattgggcagcgccggcggcggtgatttgccttcggcggagacgccatcactgggagtgagcaacatcgatgaaggagatgcccccatatccagtgccacaaacaacaacaacacctcgtcgtcgaacgatgaacagctatccgctcccctggtgacagctcgcactggggacgatagtccgctcagcgagattccccacacccccactagcaatccacgtctggatttggacattcacttcttcagcgacacggagatcaccactcccgtgggtggcggtggtgctgggtcaggtcgtgccgccggcggacgaccttcgactcccatccaaagtgacagtgaactggaaaccaccatgcgagacaaccgtcacgtggtgactgaagaaagcaccgcatcgtggaagtggggcgagttgcccacaccggagcaggccaagaatgaggccatgagcgccgcccaggtgcagcaaagcgagcaccaatcgatgctcagcaacatgttcagcttcatgaagagggcaaatcggctacgcaaagagaagggcgtcggcgaagtgggtgacatctacctgtctgatctggatgccggcagcatggaccccgagatggcggccctctacttccctagtcccctgtccaaggcggcatcaccgccggaggaggatggcgaaagcggcaatggcaccagtctgcctcactcgcccagctcgctggaggaaggtcagaagagtattgactcggactttgacgagaccaagcagcagagggacaacaagtacttggactttgtggccatgtccatgtgcggaatgtcggagcagggagcaccaccctcggacgaggagttcgaccgccacctggtcaactatccagacgtgtgcaaaagccccagcattttttcatcgcctaacctagtcgtacggctgaatggcaaatactacacctggatggctgcatgtcccattgtcatgacaatgatcaccttccagaagccactaacccatgatgccattgagcagctgatgtctcagacagtcgacggcaagtgtctgcctggcgacgagaagcaggaggcagttgcccaggccgacaatgggggtcagacgaagcgctactggtggagctggcgacgctcgcaggacgctgcgcccaaccacttgaacaacactcatggtatgcctttgggcaaggatgagaaagatggtgatcaggcagctgtggcaacgcaaacttcgcggcctacctcgcccgacatcaccgatcccacgctgagcaagagcgactccctggtgaacgcggagaacacctcggcgttggtggacaacctggaggagctaaccatggcctccaacaagagcgacgagcccaaagagcgttacaagaagtcgctgcgacttagctcggcggctatcaaaaaactgaacctcaaggagggcatgaatgaaatcgagttcagcgtaacgaccgcttatcaagggacgacgcgctgcaagtgctacttgttccgctggaagcacaacgacaaggtggtgatctcggacattgacggcaccatcaccaagtcggacgtgctgggccacattttacccatggtgggcaaggattgggcgcaactcggtgtggcgcagctcttctcgaagatcgagcaaaacggctacaagctgctctatctgtcagcccgtgccatcggccaaagcagggtgacacgcgagtacctccggtcgatccggcagggcaacgtgatgctgccggacggaccgctgttgctgaatcccacgtccctgatatcggccttccaccgcgaggtgattgagaagaagccggagcagtttaagatcgcctgtctgtcggacatccgcgatctgtttcccgacaaggagcccttctacgccggctacggcaaccgcatcaatgacgtgtgggcataccgagcagtgggcattcccatcatgcgcatctttacgatcaacaccaagggcgagttgaagcacgagctgacccaaacattccagtcctctggctacatcaatcagtcgctagaagtcgacgaatactttcccctgctaaccaaccaagatgaattcgattaccggacggacatcttcgacgacgaggagtccgaggaggagcttcagttcagcgacgactacgacgtggacgtcgagcacggttcgagtgaggaaagcagtggggatgaggacgatgacgaagccctctataacgatgattttgccaacgatgacaatggcatccaggcagtcgtggcctccggcgacgaacggaccgccgatgtgggcctcataatgcgagtccgccgcgtctccaccaaaaacgaagtcattatggcttcgcctcccaaatactgcagcatgacgtacatcgtcgatcaactgttcccgccggtgaaactcgacgaagcctccgccgagttctccaacttcaactactggcgcgaccccatccccgacctggagatccccgagctggagacggcgctggtgccaccgagcaccaaggtggacatggccaccctgcgccccattcccgagaagtga

SEQ ID NO: 58 - protein, 1102 aa, Drosophila melanogaster
MNSLARVFSNFRDFYNDINAATLTGAIDVIVVEQRDGEFQCSPFHVRFGKLGVLRSREKVVDIEINGVPVDIQMKLGDSGEAFFVEECLEDEDEELPANLATSPIPNSFLASRDKANDTMEDISGVVTDKHTDNTLERRNLSEKLKEFTTQKIRQEWAEHEELFQGEKKPADSDSLDNQSKASNEAETEKAIPAVIEDTEKEKDQIKPDVNLTTVTTSEATKEVSKSKTKKRRKKSQMKKNAQRKNSSSSSLGSAGGGDLPSAETPSLGVSNIDEGDAPISSATNNNNTSSSNDEQLSAPLVTARTGDDSPLSEIPHTPTSNPRLDLDIHFFSDTEITTPVGGGGAGSGRAAGGRPSTPIQSDSELETTMRDNRHVVTEESTASWKWGELPTPEQAKNEAMSAAQVQQSEHQSMLSNMFSFMKRANRLRKEKGVGEVGDIYLSDLDAGSMDPEMAALYFPSPLSKAASPPEEDGESGNGTSLPHSPSSLEEGQKSIDSDFDETKQQRDNKYLDFVAMSMCGMSEQGAPPSDEEFDRHLVNYPDVCKSPSIFSSPNLVVRLNGKYYTWMAACPIVMTMITFQKPLTHDAIEQLMSQTVDGKCLPGDEKQEAVAQADNGGQTKRYWWSWRRSQDAAPNHLNNTHGMPLGKDEKDGDQAAVATQTSRPTSPDITDPTLSKSDSLVNAENTSALVDNLEELTMASNKSDEPKERYKKSLRLSSAAIKKLNLKEGMNEIEFSVTTAYQGTTRCKCYLFRWKHNDKVVISDIDGTITKSDVLGHILPMVGKDWAQLGVAQLFSKIEQNGYKLLYLSARAIGQSRVTREYLRSIRQGNVMLPDGPLLLNPTSLISAFHREVIEKKPEQFKIACLSDIRDLFPDKEPFYAGYGNRINDVWAYRAVGIPIMRIFTINTKGELKHELTQTFQSSGYINQSLEVDEYFPLLTNQDEFDYRTDIFDDEESEEELQFSDDYDVDVEHGSSEESSGDEDDDEALYNDDFANDDNGIQAVVASGDERTADVGLIMRVRRVSTKNEVIMASPPKYCSMTYIVDQLFPPVKLDEASAEFSNFNYWRDPIPDLEIPELETALVPPSTKVDMATLRPIPEK

SEQ ID NO: 59 - DNA, 1782 bp, Drosophila melanogaster
tttgaactgcacgtgtttatcaattcgtttggtgtatcaaactaagttgaaaaatataatcataatggctgaggaaggaccaccggagccgagcattgattttgtcccagctctttgctttgtaccacgcggcgtggctaaggatcgtcccgacaagatcgtgctgacgcaggcggagctggccaggattatcggtgatacgcaacaggaattggacgaggagagcgacgacgatgcagaggagggcgaaaatgccgaggaagaccaaaacgacatggatgtggacgaccacgcggatgccaatagtgagaaccgcgatccgcaggacgagttccaattccaggagtatgacaacgaggcgaatgctaatgtcaccagtctggccaacatcgtggacgctggcgagcaaatccccgatgaggacgaagactccgaggccgaggacgaggtgatcaagcccagcgacaacctcattctagtgggtcacgttcaagacgacgccgcctccatggaggtgtgggttttcaaccaggaggaggaggctctctacacccaccacgactttctgctgccaagctttcctctgtgcatcgagtggatgaatcacgacgcgggcagcgaaaaggcgggcaacatgtgcgccatcggctgcatggatccgataatcacagtctgggatctagacatacaggacgctatcgagcccacatttaagctgggttccaaaggcagccggaagcagaacaaagagcagtatggacacaaggacgccgtgctggatctctcttggaacaccaactttgagcacattctggccagcgggtccgtggaccaaactgtgattctgtgggacatggacgagggccagcctcatacaaccattaccgcttttggcaaacagattcagtcgctggaattccatccgcaagaggctcaaagcattcttaccggctgtgccgatggatacgtgcgactcttcgattgccgcgacgctgagggcgtcaactcgtccagcattgagtggaaagttgacggtgaagtggagaaggtcctgtggcatcccacacagaccgactacttcatcgtgggcaccaacgatggcaccttgcattacgccgacaaacgttctcctggacaactgctgtggtccgtaaaggcccacaacgaggaaatctccggtgtgtgcttcaacaaccagaagcctaatctgctgacctccacctccacggagggcaccctaaaggtgtggaactttgatggcacagaggcaaagcacgtctacgagcacgagttcaacatgggtcgcttgcagtgcatgcgccagtgccccgaggatccctacaccctggccttcggcggagagaagcctccgcgctgtgcgatctttaacatcaagaactcgatagccgtgcgccgaacgtttggaatccctgatgcagagtaggcaaatcgtacagctacgtatttatctgtgtatatgctttatatgacttttaaataaatatgaattatatataagaaccttaatgattgacttttatattaattaaaatttattgataacttgcgcatatatgcactttacacttttatgcttaaacaactaatcgacatttcaggggggatgggtcacaaacgaaatacaaaacattaatcctaaacattccgagcattccttaacactacattacgtataccaaataagcttatctgtgctcctaactcttgaatagacccacgcacatcaggagatttcggcgcgtaaagtgcaggctgacaaat

SEQ ID NO: 60 - protein, 459 aa, Drosophila melanogaster
MAEEGPPEPSIDFVPALCFVPRGVAKDRPDKIVLTQAELARIIGDTQQELDEESDDDAEEGENAEEDQNDMDVDDHADANSENRDPQDEFQFQEYDNEANANVTSLANIVDAGEQIPDEDEDSEAEDEVIKPSDNLILVGHVQDDAASMEVWVFNQEEEALYTHHDFLLPSFPLCIEWMNHDAGSEKAGNMCAIGCMDPIITVWDLDIQDAIEPTFKLGSKGSRKQNKEQYGHKDAVLDLSWNTNFEHILASGSVDQTVILWDMDEGQPHTTITAFGKQIQSLEFHPQEAQSILTGCADGYVRLFDCRDAEGVNSSSIEWKVDGEVEKVLWHPTQTDYFIVGTNDGTLHYADKRSPGQLLWSVKAHNEEISGVCFNNQKPNLLTSTSTEGTLKVWNFDGTEAKHVYEHEFNMGRLQCMRQCPEDPYTLAFGGEKPPRCAIFNIKNSIAVRRTFGIPDAE

SEQ ID NO: 61 - DNA, 2031 bp, Drosophila melanogaster
gcaaataacgtgggattgtgcgttttgccgaccgcgaaatggggaaaagtatcgccggcgcaggcgacatacgcaaacaccaggcggcacttttccgccagccgaagatgcttcttagatcgcatttcatgctctttcaggttgcaggaatcttctggcgtcccccttctcgtcctttcgaaggctctcatgtgagacggcgagcgtggatctgcgactgggacttcgactgctgagcgccgggcgtagaacaagatgaccaccagcagtgaggacgtgctgctccagatgggcgaggtgcggtacaagaagggcgacggcacgctctacgtaatgaatgagcgtgtggcctggatggcggaacaccgggacacggtaacagtctcccatcgttatgcggatatcaagactcaaaagatatctcctgagggcaagcccaaggtgcagctgcaagtggttcttcacgacggcaacacatcgaccttccacttcgtcaaccgccagggacaggccgcaatgcttgccgacagggacaaggtcaaggagctattgcagcaactgcttcccaacttcaagcggaaggtggacaaagacctggaagacaagaaccgcatccttgttgagaatcccaacctgctgcaactctacaaggaccttgtcataaccaaagtcctaaccagcgatgagttctgggctacgcatgccaaggatcacgcccttaagaaaatgggcagatcccaggagatcggtataggtgtttctggcgcctttctggctgacataaagccgcagacagacggctgtaatggcctcaagtacaacctcacctctgatgtgattcactgcattttcaagacctatcccgccgttaaacgcaaacattttgagaatgtgcctgccaaaatgtccgaggccgagttttggaccaagtttttccaatcacactactttcatcgtgacagactgacagccggcacaaaggacatattcacggagtgcggcaagatcgatgaccaagcattaaaagcggctgttcagcagggagctggtgatcctttgctagaccttaaaaagtttgaggatgttcctttggaagagggctttggcagcgtagcaggggaccgcaacgtcgtgaacagcgggaatattgtgcaccaaaacatgatcaagcgattcaatcagcattccatcatggtgcttaagacctgtgctaacgtgacctcagcgccgtcaactatgaccaatggtaccaataatgccaacgggcctgtttcccaatccgcgtatacgaacgggatgaatggaaagggccaggccacggccaccgcgacgaagagttcctccgatcaggtggacaaagacgagccgcagagcaaaaagcaacgactgatggaaaagattcactatgtggatctcggggaccctatattggagggagatgattccgccaacggcgagaaagccaagtctaagcacttcgaactgtccaaagtggagcgttacctcaatggccctgtccagaacagcatgtacgacaaccacaacgatccaatgagtcttgaagaggtgcagtacaagctggtgcggaattcggagtcatggctaaaccgcaacgtgcaacgaacgttcatctgttctaaggcggcagtaaatgctctgggtgaactaagtcctggcggttccatgatgcgcggtttccaagagcagtcagcgggacaacttgttccgaacgacttccaacgagagctgcgccacttatacctttcgctgtccgagctgctgaaacacttttggagctgctttccgcccacctcagaagagctggagacaaagttacagcgtatgcacgagacgttgcagcgcttcaaaatggccaaactagtgccttttgaggtgagttttacaaaccgcgctatgcacgaactttcgccactgcgatcctcgctgacgcagcacttgaatcagctgctgcgcaccgccaacagcaagttcgcaacttggaaggagcgaaaactgcgcaacaccaggtag

SEQ ID NO: 62 - protein, 591 aa, Drosophila melanogaster
MTTSSEDVLLQMGEVRYKKGDGTLYVMNERVAWMAEHRDTVTVSHRYADIKTQKISPEGKPKVQLQVVLHDGNTSTFHFVNRQGQAAMLADRDKVKELLQQLLPNFKRKVDKDLEDKNRILVENPNLLQLYKDLVITKVLTSDEFWATHAKDHALKKMGRSQEIGIGVSGAFLADIKPQTDGCNGLKYNLTSDVIHCIFKTYPAVKRKHFENVPAKMSEAEFWTKFFQSHYFHRDRLTAGTKDIFTECGKIDDQALKAAVQQGAGDPLLDLKKFEDVPLEEGFGSVAGDRNVVNSGNIVHQNMIKRFNQHSIMVLKTCANVTSAPSTMTNGTNNANGPVSQSAYTNGMNGKGQATATATKSSSDQVDKDEPQSKKQRLMEKIHYVDLGDPILEGDDSANGEKAKSKHFELSKVERYLNGPVQNSMYDNHNDPMSLEEVQYKLVRNSESWLNRNVQRTFICSKAAVNALGELSPGGSMMRGFQEQSAGQLVPNDFQRELRHLYLSLSELLKHFWSCFPPTSEELETKLQRMHETLQRFKMAKLVPFEVSFTNRAMHELSPLRSSLTQHLNQLLRTANSKFATWKERKLRNTR

SEQ ID NO: 63 - DNA, 582 bp, Drosophila melanogaster
atgacgcagatgtccgacgaacagtttcgcatattcatagaaaccattaaatcgctggggccaatcaaagaggaaccgccatccaagggtagctttagcaactgcacggtgagattcagtggccagcgggatcacgatgccgtggacgagttcatcaatgccgtggagacgtataaagaggtggagggcatcagcgacaaggatgcgctaaagggtttgccgctgctcttcaagagcattgccgtggtgtggtggaagggtgtgcgccgggatgccaagacctggtcggatgccctgcagctgctgcgcgatcacttctcgcccactaaaccttcctaccagatatacatggagatcttcgagacgaagcagtcctacgacgaagtgatcgactcattcatctgcaagcagcgagcgctcctagccaagttgccggagggacgacacgacgaggagacggagctggacttcatctacgggctgatgcagcccaagtaccgggagagcataccccgacacgaggtcaaaaccttccgggagctactcgatcgggggcgaactgtggagcgcacaaggcactga

SEQ ID NO: 64 - protein, 193 aa, Drosophila melanogaster
MTQMSDEQFRIFIETIKSLGPIKEEPPSKGSFSNCTVRFSGQRDHDAVDEFINAVETYKEVEGISDKDALKGLPLLFKSIAVVWWKGVRRDAKTWSDALQLLRDHFSPTKPSYQIYMEIFETKQSYDEVIDSFICKQRALLAKLPEGRHDEETELDFIYGLMQPKYRESIPRHEVKTFRELLDRGRTVERTRH

SEQ ID NO: 65 - DNA, 2571 bp, Drosophila melanogaster
atgcaacatcgatttctcttgcaggatgacctgccgcaccacaacagcagcagcagccagctgggccagcaacacggctcatcgttggaccagtgcggattgactcaggccggcctcgaggagtacaataatagatcgtcctcgtactacgaccagacggccttccatcaccagaagcagccatcctatgcccaatccgagggctaccacagctatgtgtcaagttcggattccacatcggccacgccatttctggataaattacgtcaggagagcgatctgctgtcgcgccaatcgcatcattggtcggagaacgatctgtcctccgtttgcagcaactctgtggcgccttcgcccattccgctgttggcccgtcagtctcactcccactctcattctcacgcgcattcccattcgaactcccatggccattcccacggtcacgcccactcagcctcctcatcctcatccagcaacaacaatagcaacggcagcgccaccaacaacaacaacaacaacagctcggaaagcacttcctccacggaaaccctcaagtggctgggctccatgagcgatatatccgaagccagtcatgcaaccggctacagcgccatctccgaatcggtttcctcctcgcagcgcattgtccacagttcccgggtgccgacacccaagcgtcatcatagcgagagcgtgctgtatctgcacaacaacgaggagcaaggcgacagctcgcccactgcgagcaactcctcgcagatgatgatctccgaggaggcgaatggcgaggaatcgccgccgtcggtgcagccacttcgcatccagcaccgtcacagtcccagctatccgcccgtgcacacctcgatggtgctgcaccactttcagcagcagcagcagcagcagcaggattaccagcacccgagtcgccaccacaccaaccagtccacgttgagcacacaaagttccctgctggagctggcctcgcccacggagaaacctcgctccctcatgggacaatcccactccatgggcgacctgcagcaaaagaatccgcatcagaatccgatgttgggacgatcggctggtcagcagcacaagtccagcatttccgtgaccatttccagcagcgaggccgtggtcaccattgcaccacaaccgccagctggtaagcccagcaagctgcagttgtccctgggaaagtcggaggccctcagttgcagtacacccaatatgggggagcagagtcccacgaacagcatcgattcctaccgcagcaaccatcgcctgttcccggtgagcacctacacggagccggtgcacagcaacacctcgcagtacgtgcagcatcccaagccgcagttcagctccgggctgcacaagtccgccaaacttcctgtgataacgccagcgggggccacagtgcagcccacctggcactcggtggccgagaggattaacgactttgagcgcagtcagttgggggagccaccgaagtttgcctacctggagcccaccaagacgcaccgcctctcgaatccggctctaaaggctctccagaagaacgcagtgcagtcctatgtggaacgacagcagcagcagcagaaggaggaacagcagctactacgtccgcactcgcaatcctaccaagcgtgtcatgtggagcgcaaatcactgccgaacaacttgagtcccataatggtgggtctgcccactgggagtaactccgcatcgactcgggactgcagttcacccactccaccaccaccgccacgacgttcggggagtctgctgcccaatctgctaaggcgctccagttcggcctcggactacgcggagttcagggagctgcatcaggcacagggtcaggtcaagggaccgagcattaggaacataagcaatgccgagaaaatctccttcaatgactgcggaatgccacctccgccgccgccaccacgaggacgtttggccgtgccgaccagacgcacatcctcggcaacggaatacgcacccatgcgggacaaactgctgttgcagcaggccgccgccttggcccaccagcagcaccacccgcagcagcatcgccatgcccaaccgccccatgtgccgcccgagcgtccgcccaagcatcccaatcttcgggtgccgtcgcctgagctgccaccgccgccgcagagtgaacttgacatcagttataccttcgatgagccattgccgccgccaccgccgccggaagtgctccagccacgcccaccgccctcgcccaaccggcggaattgcttcgccggagcatccacacgtcgcaccacctacgaagcaccaccgcccaccgcaattgtcgccgccaaggtgccaccgctggtgcccaagaagccaacgagcttgcagcacaagcatctcgccaacggaggaggcggcagtcgcaagcgcccgcaccacgcgactccacagcccatcctcgaaaatgtggccagtcccgtggcgccaccgccgcccctgttgccgcgtgccagatccaccgcccatgacaatgtgattgccagcaatctggagagcaaccagcagaaacggtga

SEQ ID NO: 66 - protein, 856 aa, Drosophila melanogaster
MQHRFLLQDDLPHHNSSSSQLGQQHGSSLDQCGLTQAGLEEYNNRSSSYYDQTAFHHQKQPSYAQSEGYHSYVSSSDSTSATPFLDKLRQESDLLSRQSHHWSENDLSSVCSNSVAPSPIPLLARQSHSHSHSHAHSHSNSHGHSHGHAHSASSSSSSNNNSNGSATNNNNNNSSESTSSTETLKWLGSMSDISEASHATGYSAISESVSSSQRIVHSSRVPTPKRHHSESVLYLHNNEEQGDSSPTASNSSQMMISEEANGEESPPSVQPLRIQHRHSPSYPPVHTSMVLHHFQQQQQQQQDYQHPSRHHTNQSTLSTQSSLLELASPTEKPRSLMGQSHSMGDLQQKNPHQNPMLGRSAGQQHKSSISVTISSSEAVVTIAPQPPAGKPSKLQLSLGKSEALSCSTPNMGEQSPTNSIDSYRSNHRLFPVSTYTEPVHSNTSQYVQHPKPQFSSGLHKSAKLPVITPAGATVQPTWHSVAERINDFERSQLGEPPKFAYLEPTKTHRLSNPALKALQKNAVQSYVERQQQQQKEEQQLLRPHSQSYQACHVERKSLPNNLSPIMVGLPTGSNSASTRDCSSPTPPPPPRRSGSLLPNLLRRSSSASDYAEFRELHQAQGQVKGPSIRNISNAEKISFNDCGMPPPPPPPRGRLAVPTRRTSSATEYAPMRDKLLLQQAAALAHQQHHPQQHRHAQPPHVPPERPPKHPNLRVPSPELPPPPQSELDISYTFDEPLPPPPPPEVLQPRPPPSPNRRNCFAGASTRRTTYEAPPPTAIVAAKVPPLVPKKPTSLQHKHLANGGGGSRKRPHHATPQPILENVASPVAPPPPLLPRARSTAHDNVIASNLESNQQKR

SEQ ID NO: 67 - DNA, 2058 bp, Drosophila melanogaster
atgagacgtgcgattcgggcaatattttcggtgcttttggcttttgtcctcaagtcgtggcggttactgccgatgaccccatcgaattccaaggcctcatacttgccgcgtcagagtctggagaagttgaacaacactgatcccgaccatggcatatacaagctcaccctgacctccaacgaggacttggtggcccacacgaagcccagctatggggtcacaggaaagctgcccaacaatctgccggatgtcctgccgctgggcgttaagctccaccagcagccaaagttgcagccaggatcgccgaacggcgatgcgaatgtgaccctgcgctatggctccaacaacaatctgactgggaattccccgacggttgccccgcccccctactatgggggcggccagcggtattcaactcctgtgctgggtcaaggttacggcaaaagttcgaagcccgtgaccccgcaacaatatacgagatctcagtcgtacgatgtgaagcacactagtgcggtgactatgccgacaatgtcccagtcccacgtggatctcaagcaggccgcccatgacctagagacgacgctggaggaggtgctgcccactgccacgcccacgccgacgccaacaccgacgcccacaccgccacgcctctcgccggcttcctcgcactcggactgcagtctgagcaccagttccttggagtgcacaatcaatcctatagcgacaccgattcctaagcctgaggcgcacatctttcgcgccgaggtgattagcaccaccctgaacacaaatccgttgacaacaccgcccaagcccgcgatgaaccgccaggaatccctgagggagaacatcgaaaagatcacccaactacagtcggtgctgatgtcggcgcacctgtgtgatgcgagtctactaggtggttacaccactccactgataaccagtcccactgccagtttcgctaacgaaccactaatgacaccaccactgccgcccagtccgccaccgccactagaaccggaggaggaggaggagcaggaggagaacgatgtgcacgacaagcagccagagatcgaggaactgcagctgatgcagcgcagcgaattggtcctaatggtgaatcccaagccgagcacaacggatatggcctgccaaacggacgagctggaggacagggacacggacctcgaagcggcacgcgaggagcaccagactagaacgactctgcagccgcgacagcgccagcccatcgagctggactacgagcagatgagccgggagctggttaagctcctaccgcctggtgacaagatcgccgacatcctcacaccaaagatctgcaagcccacctcgcaatacgttagcaatctgtacaatccggatgtgccactgcgcttggccaagcgcgatgttggcacctctacgttgatgcgaatgaagtccatcacgtcgtctgccgagatccgagtggtcagtgtggagctgcagctggcagagccgagcgaggagccgacgaatttaatcaagcaaaagatggatgagctcatcaagcatttgaaccaaaaaattgtctccctgaaacgcgagcagcagacgatcagcgaggagtgctcggccaatgacagactgggccaggatctattcgccaagctagcggagaaggttcgacccagcgaagcctccaagttccgtacccatgtcgacgccgtgggcaacataaccagtttacttctgtcgctttccgagcgtttggcccaaaccgaaagcagcctggaaacgcgccagcaggaaaggggcgcgctggaatcaaagcgggatctgctgtacgagcagatggaggaggcgcagcgtctcaaatcggacatagaacgacgtggagtcagcatcgccggattactggccaagaacctcagcgcggacatgtgcgccgactacgactacttcatcaacatgaaggccaagctgatcgccgatgcacgcgacctggccgtaaggatcaagggcagcgaggagcagcttagctccctcagcgatgcgctagtccaaagcgattgttag

SEQ ID NO: 68 - protein, 685 aa, Drosophila melanogaster
MRRAIRAIFSVLLAFVLKSWRLLPMTPSNSKASYLPRQSLEKLNNTDPDHGIYKLTLTSNEDLVAHTKPSYGVTGKLPNNLPDVLPLGVKLHQQPKLQPGSPNGDANVTLRYGSNNNLTGNSPTVAPPPYYGGGQRYSTPVLGQGYGKSSKPVTPQQYTRSQSYDVKHTSAVTMPTMSQSHVDLKQAAHDLETTLEEVLPTATPTPTPTPTPTPPRLSPASSHSDCSLSTSSLECTINPIATPIPKPEAHIFRAEVISTTLNTNPLTTPPKPAMNRQESLRENIEKITQLQSVLMSAHLCDASLLGGYTTPLITSPTASFANEPLMTPPLPPSPPPPLEPEEEEEQEENDVHDKQPEIEELQLMQRSELVLMVNPKPSTTDMACQTDELEDRDTDLEAAREEHQTRTTLQPRQRQPIELDYEQMSRELVKLLPPGDKIADILTPKICKPTSQYVSNLYNPDVPLRLAKRDVGTSTLMRMKSITSSAEIRVVSVELQLAEPSEEPTNLIKQKMDELIKHLNQKIVSLKREQQTISEECSANDRLGQDLFAKLAEKVRPSEASKFRTHVDAVGNITSLLLSLSERLAQTESSLETRQQERGALESKRDLLYEQMEEAQRLKSDIERRGVSIAGLLAKNLSADMCADYDYFINMKAKLIADARDLAVRIKGSEEQLSSLSDALVQSDC

SEQ ID NO: 69 - DNA, 1697 bp, Drosophila melanogaster
cgaaagcgttaacaacgtttcaacggatcttcagcgtgtgagataatattacatacgtagaaataatatcaggaaggcagcagcaacagcagcaaaaacaacgcgagtagccctctctctgcgcctctttcgcctgtcaacagttattttagccgattgttttgtgtgactttttcgtgtgctgttcgctttcgtttcgtttagctgttcggcaactccttcatttcattaaaaatagtaaggccttgtaacaacaacaacaagaacgacgacgtgtttatgtgtgtgtatgtgacagcgtttgcatacggaaaagagtagagagtgcaacaataataactgcaacaaaaacagaaaactgaaaatcaacagcaacatttgaaagggaatcgtttctacttgtttgtttaagcgaagtcaagatgtccacgcccacttccccgaagacgcccacaccgcccactttgccaccgggcgtgaccaaaacatgtcacattgtgaaaaggcccgatttcgatggctatggtttcaatttgcattcggagaaggtgaaaccaggacagtttattggcaaagtagatgcggattctccggcagaggcagccggcctgaaggagggcgatcgcatcctggaggtcaacggggtgtccattggcagcgagacccacaagcaggtggttgccaggatcaaggccattgcgaatgaagtccgcttgctgctcatcgatgtggatggcaaggccttggaggtgaaaccggcatctccgccagccgctgcgtgcaatggaaacggtagtgccagtcagaatggatacgagggcaccaaacaggagatgcccggagcaagtgccaatatcagtagcatcagtatggtgagcaccaagcgatcctcaaatgccagcagcattcagagcggcagtaccatgaatgcctccgatttggatgtggtcgataggggaataccggcagtcgctgctccggtggctatcaccccgcctcccgttcaaaatggaagtaaaccctcatcgccgattaataataacactttgatgagcacaccgccaccgccgtccgctactaaggctggcatcaacaacaatggcagtgtttataacaccaatggaaatggtacaaatggcatgaccacacccactacaccacccccaccgaccagtggctataaggcgggcaccttgcatttaccaatgacggccgccgaaatgcgcgccaaattggcatccaagaagaagtacgatcccaagaacgagagtgtggacctcaagaagaagttcgacatcattcagaagctctgagacgaaaagggtagcccaaccaactacttgttataatgtcaggatgaggagctagagctggttttgtcaggcatacaccacaccacacaatatacaatatgtttagctattagtacgaagagtcacttattaactaagcaagtttttaattattaccccctaagagaaagagcgaccaacgatggtagagtaaacggatatgatggagcacctacccttggaatatctatacattgtacgacatacgcgtattcttcaaattcaaatattgcaaactccgattggcaatgttgccctggttcattgaacaactttcattgaatatgtacttagttttgcttgtatttttgtaaagtaaataaagcaaaaatataaaagaaatac

SEQ ID NO: 70 - protein, 296 aa, Drosophila melanogaster
MSTPTSPKTPTPPTLPPGVTKTCHIVKRPDFDGYGFNLHSEKVKPGQFIGKVDADSPAEAAGLKEGDRILEVNGVSIGSETHKQVVARIKAIANEVRLLLIDVDGKALEVKPASPPAAACNGNGSASQNGYEGTKQEMPGASANISSISMVSTKRSSNASSIQSGSTMNASDLDVVDRGIPAVAAPVAITPPPVQNGSKPSSPINNNTLMSTPPPPSATKAGINNNGSVYNTNGNGTNGMTTPTTPPPPTSGYKAGTLHLPMTAAEMRAKLASKKKYDPKNESVDLKKKFDIIQKL

SEQ ID NO: 71 - DNA, 1353 bp, Drosophila melanogaster
atgaagagagcagcaacaacaaagatgactggagccacggctgcgggagcaacaacaacaacatcgtcaacaggtgcagtgggatatcccgttctcaaaacacccaagtatgtggttcagactagtccgagtggatcctctggccatcagctccagatgctggcgaggaaggacactcaaagtctgggagtggccatcaattcactgccgcccaacacaatcatcaaagcaaccacaagaccttcacaaacagcgcctttgacaccaaactcagcggctgtcacgccaagcacgccgagcagtagcaggaattccactcagtccacaccaactgtggtacctgatgcgagagtttcctccgccgtgcgccaagctgtgttcatcaagagggagctaccccagccgcagaggagcatgcgaaatatgacacttggtttggtggaacaggcgccactgcttcatttgggtgttgcgccacagcacctgtcactgctgaaacgccatatctgccgcaatgctaatgtcacccacttggactgttgcttgactctaaggaaactcaaacaaaacgagcacttcgccctgttggccgagcactttgagctgagcgaatcagatgtcgaggacacatttaagcgcacccttatcaagctggcccgttacctccgtccactgattcgttggccagatgcacggcatcacaacgagcgcttcaaacataccccactgaactaccgagccaacctgttgcatgtacgctcgttgatcgagtgtgtggaaacggacgtgccgatagatctgggattgggcagcggcagctataagttcatattgtgcatcaatacaaatggcatcatcagctatgtgtctagcgcctttcctggtagttgcgatgatcttcaattgtttgaggccagcagatttcgggatgtcattcccaattacctaacactatgcgcggaaccaggcaaagcagtacgccgtgctcgcaggtcgggcttcggagatcctcacgactcagcggatgaggatgaggcggcggcggaaccaaagcgatcacttaccaaattcgaggcacagcgtttgagtggccagctagcaagccagcaatccctatccgttgtagacggagcactgacttccaagcgggctccagcgattcaactacccacattcaacgcacaagaacccgcctgtagagcccaaatgagagatatgatagattatttaagggaattccgcatgctggataattcggctattaagcaaaagtcattgctgggttatcttgatgaaatgatcgtggtggctgcgggtctatgcaaccttaagcgccaagagttggaatcttaa

SEQ ID NO: 72 - protein, 450 aa, Drosophila melanogaster
MKRAATTKMTGATAAGATTTTSSTGAVGYPVLKTPKYVVQTSPSGSSGHQLQMLARKDTQSLGVAINSLPPNTIIKATTRPSQTAPLTPNSAAVTPSTPSSSRNSTQSTPTVVPDARVSSAVRQAVFIKRELPQPQRSMRNMTLGLVEQAPLLHLGVAPQHLSLLKRHICRNANVTHLDCCLTLRKLKQNEHFALLAEHFELSESDVEDTFKRTLIKLARYLRPLIRWPDARHHNERFKHTPLNYRANLLHVRSLIECVETDVPIDLGLGSGSYKFILCINTNGIISYVSSAFPGSCDDLQLFEASRFRDVIPNYLTLCAEPGKAVRRARRSGFGDPHDSADEDEAAAEPKRSLTKFEAQRLSGQLASQQSLSVVDGALTSKRAPAIQLPTFNAQEPACRAQMRDMIDYLREFRMLDNSAIKQKSLLGYLDEMIVVAAGLCNLKRQELES

SEQ ID NO: 73 - DNA, 663 bp, Drosophila melanogaster
atgaagtcgttcgggaacttgacctttggcctactcgtcatccttatagcaagctttactgtcggcctagaggctcgtcgcctggctttgcgtccattgacaggaagggaactgagaagagctcttagggaatccggattcgatgaggattctgcagctggaagatcagtggcgtcggcgctgtccggactcagtggattcgccctgggcatcacaaagggcattggtggctcactgctgttcgatgtggtcacctcgaatgtgaccattgattacattaccagtctgctgaactccactgcctcatcgtcgacttcaagcagcagtggaactgcacaggagatctgtttcaacagtcgcagtgccgacggtgaggtgattaacggcaggagtaatggcttcaatgacatggatgatggagcagatctcgacggcgagtggagacagactaccagtggcacgggcacgggctctgttactggcactggcactgagacaggaactaccacctcctcgtcttccaacggcctcacctgcattgtcctgagcaaggagggttcccgtcgcaggcgccagttgcgaatccaaccaggaacgttgagatctgtttatcctaaaagccatcggcagaccctgaaaaagtaccgccggcatagggtttag

SEQ ID NO: 74 - protein, 220 aa, Drosophila melanogaster
MKSFGNLTFGLLVILIASFTVGLEARRLALRPLTGRELRRALRESGFDEDSAAGRSVASALSGLSGFALGITKGIGGSLLFDVVTSNVTIDYITSLLNSTASSSTSSSSGTAQEICFNSRSADGEVINGRSNGFNDMDDGADLDGEWRQTTSGTGTGSVTGTGTETGTTTSSSSNGLTCIVLSKEGSRRRRQLRIQPGTLRSVYPKSHRQTLKKYRRHRV

SEQ ID NO: 75 - DNA, 862 bp, Drosophila melanogaster
tggcgacgtcgcttgaggaataaactgaagcgctgtgaatatttagaacgatgaagctgttcttatccgttttcgtggtagccctggtggccggcgtcgttgttgccgacgatagcaagggtcccaaagtgaccgagaaggttttctttgacatcaccattggcggcgagcccgctggtcgcatcgagatcggtctgttcggcaagacggtgcccaagacggtggagaacttcaaggagctggcgctgaagccgcagggcgagggctacaagggcagcaagttccaccgcatcatcaaggacttcatgatccagggcggtgacttcaccaagggcgacggcaccggcggtcgctccatctacggcgagcgcttcgaggatgagaacttcaagctgaagcactatggcgccggctggctgagcatggccaacgctggcaaggacaccaacggatcgcagttcttcatcaccaccaagcagaccagctggctggatggacgccacgtcgtcttcggcaagatcctgtcgggcatgaatgtggtgcgccagatcgagaactcggccactgatgcccgcgaccgtcccgtcaaggatgtggtcatcgccaacagcggcaccctgcccgtttcggaggccttctccgtggccaaggccgatgccaccgactaaagtgtttggggagcatgtcatccatcagcaacataaccgatttgaactaagcataaacgcataatcgatttttccagacatttgcatttaccatagctcgccatgtttatttacatttcgttccgtaagcaagtaattgtgctcaactaaaaacagaaatggcataaataaagaatgattttttgtgtgataaa

SEQ ID NO: 76 - protein, 205 aa, Drosophila melanogaster
MKLFLSVFVVALVAGVVVADDSKGPKVTEKVFFDITIGGEPAGRIEIGLFGKTVPKTVENFKELALKPQGEGYKGSKFHRIIKDFMIQGGDFTKGDGTGGRSIYGERFEDENFKLKHYGAGWLSMANAGKDTNGSQFFITTKQTSWLDGRHVVFGKILSGMNVVRQIENSATDARDRPVKDVVIANSGTLPVSEAFSVAKADATD

SEQ ID NO: 77 - DNA, 945 bp, Drosophila melanogaster
atgacgacaacgctgccggagaaggaagcggaaacgcagcaggagatcagggagcgggaggccaaggctctggaggaccgaaaggagcgcaagatctacgagaactttgccacgcccctggcaggcacttttctcaacctgccacgcgagcccgtggagatcgagtgccccgcctgcggaatcaaggatctgagtgtggtgcaaaatgatctgaagtggtgggccagtgaactaaaccgcattcctcagtctgcgtttgtttttaaagcagtcaacatctttcggtgcgaaatggctcaggatccgaaaccactttactttgccgtgggccccggccccaacgacattacgtgtccttattgcaggaccaaggccaagacccgtgtggtgcgttcctggctgcgttgctgcaccaagaggcatcactgcggtgcctgcggggagtacctgggctcaccgatcgttctcgctggaactcgcatcatgaccgtggacgaaccgcagattgtggccatcattgtcagccacaagccacaagtgggatacctgaaggaggagcccacctggatccgttgtccttcgtgtgagaagtctggaaccagtttggtgcaactggagttggtcacttgcctgcagagatttctgggattcacaaaactttgtaaaaaatggtctggccgccaggacatcaatcactattgttcacactgcggttgcttcattggaagatttgtgcccatcagctgcatggaacgatgcatttcgagatcagcccgtaaacaggcggccgtggatgatatgaccctgaagacacgacccaaggattgcgctgaaagggcccagaaatccagggagaaagttctggccagcagggagaagaagagagcagagaaggcagccaaggatatggacaaatctcagacgcaaatagcagtacaccaataa

SEQ ID NO: 78 - protein, 314 aa, Drosophila melanogaster
MTTTLPEKEAETQQEIREREAKALEDRKERKIYENFATPLAGTFLNLPREPVEIECPACGIKDLSVVQNDLKWWASELNRIPQSAFVFKAVNIFRCEMAQDPKPLYFAVGPGPNDITCPYCRTKAKTRVVRSWLRCCTKRHHCGACGEYLGSPIVLAGTRIMTVDEPQIVAIIVSHKPQVGYLKEEPTWIRCPSCEKSGTSLVQLELVTCLQRFLGFTKLCKKWSGRQDINHYCSHCGCFIGRFVPISCMERCISRSARKQAAVDDMTLKTRPKDCAERAQKSREKVLASREKKRAEKAAKDMDKSQTQIAVHQ

SEQ ID NO: 79 - DNA, 2591 bp, Drosophila melanogaster
ccagaaaagagccatagcatattctcacagctacatatacatatgagcaggcagcagcagcagcagtagcagcggcagagagaaaatcggttcaatcttgaaaagtgtgtttcccagtgcttcacctgaagttttttggcactaccttgccttaccagagtaagcggaagtcaatttggcctatgacaatacaaacgcactttcttcgctacgcattgtccaggtgcgtgtgcgtatagagagagcgagcgagaggtgaaatatttaggtttaaaggccaggcgcgtgtgtgtgacccatgaaaagttgttaaacataagcaacgtcaatcgccgctgatcgaaagaagagaaacccctacgcgcgcgtgtttaatttgtatttttggcactttggttggcaaacagcaaaagcatttccctatgattggctcattctggaatctgtgcagagcgtgcccatcaatgccggtagacaagctccactcggagtatcggagcacttatcgctggcatgaatttacgggcaactcgcggccagaggttgtgcgacgggcgcctgccccaaacccaagtcaatttgttggagcgacaaatgagccgccattgccacgccggaaaaaatgtccagaattagcatataaatcgcacgagtttattataggatcggagtatacagatggacgccgagatgccagtgcacatcgtttggcgagatcggaggagcgcggtggcacaccttcgcgccgcagcaaatcggagggaccacccgttgtgcccaatggacgtgcgtatcccattgccacggagatcgacggaaccacaagaaaacaggcgggtgagtcaaatgggctattgaaaaagaccatcaataagttgagcactgagtaccgcctgcaattcgtttggcccaccgtccgacgcataaagggcggcggcgaggcgacgtctagggccgctgccggcgactatccgagaaagtccatatcgctgggcgcccttcggtccggcggccaaggtcactgtcacagtcacacccaaaaccagaatcagagccagagtcagggtctgacccaagcccagaatggtcacacacatcacacgatgatgggtggcggtgcgggcttgccgacggtgcataaaaaacgaacaacaaatcagaaagaagtgttgcatgctgcagccatcgagaagcacagcagttcccacttgaagctcagaatctctcaggagccagcactacttcccattgctaatgactctcccgattcttgcagacaagtgaccattatggagcgcaagaccacctcgcgtcccttctcgcaggccatcgaccaggagcgcctaaaccacttcatcacgaaaaaggagaactttggcttcgccgacgccgccgtggccgccgcggccctcaaggacgaggtggacaaccggcaggccggcgaatccggccaggtggtggtcatgaacggctctgccccgccgcactcgaaaccgaatttggatttgtggttcaaggagatggtggagctgcgcaaaaaagccggcgaatacaagtgtcgcggttggggcatagaaattgatccggaattgtataagaaacagaaggatctttgggatcaggtttcaaagcgcagctcactttcggcactttccctagcctcttcagttcatagacctattacaaaggaggagaaggaacaggagaacaataagaagtccacgccattgcagaaggcccagaagccgcgtgttcctggccaagcctttttgattgataataaggatgagatttcagcactgccagcacgatttagcaatatacgccatcaccttgaacgcaccacaggtccggatgtggaagagggagctttgttgccctcgccaacgcgcgagaagctgatgccggctattaccaagcgggaatcggaatctcagcgaggaagtcccaagaagaccgccttgtccaggcacggatcgcctcagaagggcagtcctcaaaagggcagccccaagaaggtccttaaaagtgagtagttccccgctttttccctcacctttgagcagaggatacaaggaaagaatgcatacgcatatccgattttaattccaaagttaaccatatccgaatagcaaatttactcttttgcaacaatgacacaagtacacaaaatgcacttaccaatagagttacgagtttgggaacagaacaaaacattgtacacgctccaacaataagtatacgccccgttaccaataccttgatttggtttcctatgattttcgttttgccatagtttgctcaactgcttcaaccgtttgatttgcattttccccgacagtcgaaggagtcgactcgtttttcatcattgtcaagtgcaccgaagacttcttgggatatgagatttgtgcacaatcctaatgtagtttctatttacttacatttgccagtttttatcgagggtttgtgttctgaattcggttgaaagttgattttcatgttctacgtttaagctatgatttgtagagaaccttttgagaacatatgagtcaatcccttaaaaccacaactacttacatttatatattgag

SEQ ID NO: 80 - protein, 537 aa, Drosophila melanogaster
MIGSFWNLCRACPSMPVDKLHSEYRSTYRWHEFTGNSRPEVVRRAPAPNPSQFVGATNEPPLPRRKKCPELAYKSHEFIIGSEYTDGRRDASAHRLARSEERGGTPSRRSKSEGPPVVPNGRAYPIATEIDGTTRKQAGESNGLLKKTINKLSTEYRLQFVWPTVRRIKGGGEATSRAAAGDYPRKSISLGALRSGGQGHCHSHTQNQNQSQSQGLTQAQNGHTHHTMMGGGAGLPTVHKKRTTNQKEVLHAAAIEKHSSSHLKLRISQEPALLPIANDSPDSCRQVTIMERKTTSRPFSQAIDQERLNHFITKKENFGFADAAVAAAALKDEVDNRQAGESGQVVVMNGSAPPHSKPNLDLWFKEMVELRKKAGEYKCRGWGIEIDPELYKKQKDLWDQVSKRSSLSALSLASSVHRPITKEEKEQENNKKSTPLQKAQKPRVPGQAFLIDNKDEISALPARFSNIRHHLERTTGPDVEEGALLPSPTREKLMPAITKRESESQRGSPKKTALSRHGSPQKGSPQKGSPKKVLKSE

SEQ ID NO: 81 - DNA, 1716 bp, Drosophila melanogaster
atgattcgcttacggcaagcaatttgtgagcagctgccgcatctcaagaatgcctgctatgccctggaggtgcctgtcaagaaacaacagctacagaatagccgacgtccaactgtggagtggattctgccctctgcgtttgcgcaacaggaggtggaactactggactcattgaagaagcgcagattcgaggcctatgtggaaaacgttcggattgtacctagcgctgggcgcagtgcagccaaaatcgagtttcagctgcagccacaggtctttgtagaacagctcctccaaactaaagagattgctttacatccttcgccctttgctgcggaacacatagtggttgagtacagctcgcccaacatagccaaacccttccacgtgggccacctgcgctccacaatcatcggcaatgttctggccaacctgcatgagcatttgggctaccgcacaacacggttgaactatctgggggattggggcacgcaatttggactactggtattgggagttcaactgctgaatgtaagcgacaaagagatgcaactatccccaatagaaacgctgtacaaatcctacgtggccgccaacaaggctgctgaacaaagacctgaaatcgcgcaacaggcgagggacctcttcgccgccttggaaggaggaacggataaatcaatggccaagaaatggcagcaatacagaaactacactatagaggatctatccaaagtctataacagattgggcgttcacttcgatagctacgaatgggaatcccagtactcccagcagcaaattcaggatgttctggacaaactgcgaagcgctggactcctccagccggagcacgatggtcgtgagattgtcgtggtggacggccgacgcattcctgtgatcaagagtaatggatccactttgtacctggccagggacatagctgccctgctggagagactctccaggttccagttctcacgcttgctctacgtcgtggacaatggtcaagcggatcattttaatgccctttttaaaacaacggcagccctggatgaccgcctaagtctggaacagctgcaacatgtgaaatttggacgcatttatgggatgagcactcgtcagggaaaggcaatctttctaaaagatgtcctagatgaagcacgagacataatgcgggaaaagcgaaacataagtgccactaccagagaaaattacaatctggatgatgaacatgtatgtgatattttgggcgtgtcagccgtcctggtcaatgtccttaagcagcgaaggcaacgagatcacgagttcagctggcagcaggcactccaagtaaatggtgacacaggaatcaagcttcaatacacacactgccgcctgcacagtttgctggataatttccgagatgtagatctggacgacattaagcccgactggaagcatttctctacggagcctgcggatgctttggatctgctctacgcactggcacgtttcgatcaaagcgtttggcaatcgaaggaacaactggaggcttgtgtccttgtcaactatctctttggattgtgcaatgccaccagtcaagcgctgaaaagattgcctgtgaaacaagagtccagcctagagaagcaactccaacgcctgcttctttttcacgctgccaaaaaaacactgcgacacggaatggagctccttggcctgcgtccactgaaccaaatgtag

SEQ ID NO: 82 - protein, 571 aa, Drosophila melanogaster
MIRLRQAICEQLPHLKNACYALEVPVKKQQLQNSRRPTVEWILPSAFAQQEVELLDSLKKRRFEAYVENVRIVPSAGRSAAKIEFQLQPQVFVEQLLQTKEIALHPSPFAAEHIVVEYSSPNIAKPFHVGHLRSTIIGNVLANLHEHLGYRTTRLNYLGDWGTQFGLLVLGVQLLNVSDKEMQLSPIETLYKSYVAANKAAEQRPEIAQQARDLFAALEGGTDKSMAKKWQQYRNYTIEDLSKVYNRLGVHFDSYEWESQYSQQQIQDVLDKLRSAGLLQPEHDGREIVVVDGRRIPVIKSNGSTLYLARDIAALLERLSRFQFSRLLYVVDNGQADHFNALFKTTAALDDRLSLEQLQHVKFGRIYGMSTRQGKAIFLKDVLDEARDIMREKRNISATTRENYNLDDEHVCDILGVSAVLVNVLKQRRQRDHEFSWQQALQVNGDTGIKLQYTHCRLHSLLDNFRDVDLDDIKPDWKHFSTEPADALDLLYALARFDQSVWQSKEQLEACVLVNYLFGLCNATSQALKRLPVKQESSLEKQLQRLLLFHAAKKTLRHGMELLGLRPLNQM

SEQ ID NO: 83 - DNA, 3849 bp, Drosophila melanogaster
accgggcgggtttattttatcattgctccgcgacttcgaatacgagaccggtgttgtgcgctcctgataactgcgatatattgagcgcgagcgccatgtccttttgctggaagtagaatttgaaaagtgcagagatcacggcttggattgccaaggaacaacggtgttgagactgaatatattttttgtgcgctgtttcgaaatagaaccgttaattggaattggcagtaagaagcagagaggcggacgatattccggtgaaatcttcgccaggcggaaacatcgatcaaaacaaagtgcatgctaaaaacataaaagattcaacatgttcgaactagaggattattcgagcggcatacatgagggattcttcagcaaatatgcggatgcggctggaccctcgctagacttttatgtatccgactcgatgcaggagatgctgaacgtggacatccgcgcagagatcgccaatgtggtgggcagttccagcagcgacttgacctcgtccctggaccaaacactggaagctatatccgcgataaacaacaaccagagcaatggaaacagcagccagtcagcttcttacaatgcgaatgcgaattttctgaccagcagcggactccacgcctcacccacagcgaaatggatgggctcgtcggccaatttttggtccaacagcgattactatgcggatctgggggcatgtgtgaaccccatttccgtaatgccactgataaattcgacttctgcaggaatgttctcgccaaaaaaaaacaagacagcctcaagtacgcagggaagatcgggagcggtgccctcgtcgcccagcgccgaaagggatcagcacaaatcgcacctgacattttcgccggctcagatgaaggtcagtgcaggatccatgcggcgggaccaggtgatggcacacattcccaagcaaatatccgtggtcacgggcaccggaaccacagcgcccgccacaatggccaccaattcggtgcttcaacggcgtaattcctcggccgtggatgctgtacgtaaggatttggtcacagagctgcgtaaagcacaatccagtccagtgcccaattccttggaggagctgggcaagggaaaaggatcaacactgctaaatgccagtgttggggcgaccaacaccattaaactggcgcccggtatcggtgggttaacctttgccaacagtgcagcctaccagaagctgaagcaaacatccttggttaagtcaccaggcggtatttcgccaggagcaggatccaatatgggtctcaagcgggaggactcaaacaagcgaggactgcaggccagcaccacgccaaagagcattgcttcggcggcaaactcgccgcatcatcaaatgcagagcaactacagcctgggatcaccttcatcactgtcctcctcatctgcatcctctcccctagggaatgtgagcaacctggtcaacatagcgaataacaatacaagcggagctggatccggcttggtgaagcctctgcagcaaaaggttaaactgccacccgtgggcagtccatttcccaaaccagcatactcgtactcctgcctcatcgctttggccctcaagaattcgcgagcaggatcccttccggtctcggaaatatatagtttcctatgccagcatttcccttacttcgagaatgcccccagcggctggaagaacagtgtgcgtcacaacctgtctttaaacaaatgctttgagaagatcgaaagaccagcgacgaatggcaaccagagaaagggctgccgttgggccatgaatcccgatcgtatcaacaagatggacgaggaggtgcaaaagtggtcgcgcaaggatccggctgccatacgtggagccatggtatatcctcagcatctggagtccctggaaaggggagagatgaagcacggatcggcagactcggatgtagagctggactcgcaatcggaaattgaggagtcttcggatctggaggaacacgaattcgaggacactatggtggatgcaatgctggtagaagaggaagacgaggaggaggacggggatgatgatgagcaaataatcaacgattttgatgcggaagatgagcgtcatgccaacggaaaccaggcaaacaacctacccatcaaccatccactacttggtcagaaaagtaacgacttcgatatagaggtcggggatctatacgacgcaatcgacatagaggatgataaggagtcagtgcgtcgaattatctcgaatgaccagcacatcattgagttgaaccctgccgatctgaatgccaccgatggctacaaccagcagccggcattgaaacgggctcgcgtcgacattaactatgcaattggtcctgctggcgagttggaacagcaatacggccagaaagtgaaggtgcagcaagtcatacagccgcagcagcatccgcccacctacaacaggcgcaagatgccgctggtcaaccgcgtcatctagagcggggcacagcccaaaaacccattacattaatcaattagttttagacctttggcatttaagaaacccatgctacgcttaaacgtaatcctagaagccccatcattcaatatcgaatatcagttttcagtttcgtgtgcaaaacccaaattgttattaaatctcccttcctatttgtagttcagtttggctgctgtttgattttaaatctcgattagagcctgtgccaactgaaaaagagagataacttgtgcccttttgtttttgcttaatttaaatctttctatagtcgcttctcgaataaatctgtattatattgttcgaaaagaactgagatattgctccacttgacgatatttccgttttaattcgcctgacgcttgaggagaaaaactcaataggttccactgacgacgcatgaagcatgttaatactttttaccagactcgagctggtttgagttgcaacttttgatttgatctccctactgacaaataaattttcatccttcaatcgataagaaacttgacaatgcatttatgacaaacgattccacgcttagtcgtagaataatattaatgtgcaacacaacgattactttgacaacgaaatgtgaacagtaggtttatatttcgaacttttgttgattatttcaccacatggtgacaatttgcatttgtttcgaacattttcagctaacatttaagaaaattgaaagagaattgatcacacatacttgccggtccagtattcgtaagcgaggtatattgaggatttttacagaacttttatacgaattgtactatatatacatggaaaaccaacaattaatgtcggaaagttcagtcaattaataatatggatattttataaggcggttccgtatgtaaatagtttacacgcagagaataaattgtatactatggcatagatgtaagtaatatgtatgtaaaataatttgtaaacgaaatccgaattccaaataatacaagatacgaaaaccaataagacttaaaagaagcgtaccagactaatgaacatgatcaggcctcagaagtaaatagtacaaagagctagacttttgggtccaagcagttacaaagccaactcaaggatggctgatggaattaaaccgtttttgttattacccttttcttttgtgatgcttcgacttagcttgcgcatttaacaattccatttacgaaccaggaacatttatgcattttttgttgtaatattagcacctaaatattgtatttaatcattaagtgaagctctgtaaatctttaagctaagaaaaacaatttttgtatagagttgttagaaaatcaattgacaaaaacaaattgaaaccaaaaaaaaaa

SEQ ID NO: 84 - protein, 719 aa, Drosophila melanogaster
MFELEDYSSGIHEGFFSKYADAAGPSLDFYVSDSMQEMLNVDIRAEIANVVGSSSSDLTSSLDQTLEAISAINNNQSNGNSSQSASYNANANFLTSSGLHASPTAKWMGSSANFWSNSDYYADLGACVNPISVMPLINSTSAGMFSPKKNKTASSTQGRSGAVPSSPSAERDQHKSHLTFSPAQMKVSAGSMRRDQVMAHIPKQISVVTGTGTTAPATMATNSVLQRRNSSAVDAVRKDLVTELRKAQSSPVPNSLEELGKGKGSTLLNASVGATNTIKLAPGIGGLTFANSAAYQKLKQTSLVKSPGGISPGAGSNMGLKREDSNKRGLQASTTPKSIASAANSPHHQMQSNYSLGSPSSLSSSSASSPLGNVSNLVNIANNNTSGAGSGLVKPLQQKVKLPPVGSPFPKPAYSYSCLIALALKNSRAGSLPVSEIYSFLCQHFPYFENAPSGWKNSVRHNLSLNKCFEKIERPATNGNQRKGCRWAMNPDRINKMDEEVQKWSRKDPAAIRGAMVYPQHLESLERGEMKHGSADSDVELDSQSEIEESSDLEEHEFEDTMVDAMLVEEEDEEEDGDDDEQIINDFDAEDERHANGNQANNLPINHPLLGQKSNDFDIEVGDLYDAIDIEDDKESVRRIISNDQHIIELNPADLNATDGYNQQPALKRARVDINYAIGPAGELEQQYGQKVKVQQVIQPQQHPPTYNRRKMPLVNRVI

SEQ ID NO: 85 - DNA, 2924 bp, Drosophila melanogaster
agccgcgatttcagcgcgagttcagtttttgattcagtttcaggcggttcggagttgctaagtcaagcgcaatagctcaaaatacactttttttaatttttgttaataactgtttttaataattccggtgaaacatcgcgtggtcaagcgaactgagttaattttcgcgttagaaaagttcacaagttttgcgtttaccaaataattaactataactatttaactggagctaatttaactgaaatttagaacccaaaatgggtaattccagttccatttgcgccgatcgcaatgtcataacaaatttcgatgaaaatggcacgccggtttatcccaccgccaacaattcgcagagtccttcctcatatagtcgcggcaaagagcgcgagctcggctgttacacgaagagaaacagcaacagcaacaacaacaatagccatgagagagagagtcagagctgttgtagtagtcgtgtgtgtaaaaatcatacgaccacaacgacaaccacactcgaatacgaactttccaatttcgcaaaactaacgacacgaatcacaacgcaaagtgccgccgaagtggacacatcgccgcatacggatacggaaacgcatagggacagagattcgaatccgggtaatatagccttagccaccgatttggaactgcccaagggtctgccgttatcgttatcctcgcgacaccactggaatcagctgcagagcagtttgcacgcccttcaccaccagcaacagcaacaacaacagcaactacgttcatacagctccactagcgaaacaaatttggaagacaagatgagcaaacccgattcgaaactagataaatacgcgcagcgcgatcgcctgggcctttggggcactggtgacaatgaggtggtcggcagcctctccggattcacccgactcttggacaagcgctactcaaagggcctggccttcacacacgaggagcgccagcagttgggcatccatggcatgctgccctatgtggtccgtgagcccagtgagcaggtggagcactgccgcgctctgctggcgcgactggatcaggatctggacaagtacatgtacctgatcagcctatcggagcggaacgagcgtctgttctacaacgtgctcagctcagacatcgcctacatgatgccactggtgtacacgcccaccgtgggattggcctgccagcgctacagtttgatccaccagaacgccaagggcatgttcatatccatcaaggacaagggacacatctacgacgtgctaaagaactggccggaaacggatgtgcgtgccatcgttgtcacggacggcgagcgcatcctgggactgggagatctgggcgccaacggaatgggtatacccgtgggcaaactgtccctgtatacggccttggcgggcattaagccatcgcagtgcctgcccatcaccttggatgtgggcaccaataccgaatccatcctggaggatcccctgtacatcggtctgcgcgaacgcagggccactggagatctgtacgatgagttcatcgatgagttcatgcatgcctgcgttcgtcgctttggtcaaaactgcctaatccagttcgaggactttgccaacgccaatgccttcaggctgttgtccaaataccgcgactccttctgcaccttcaacgacgatattcaaggaaccgcgtcggtggccgtggctggtctgctggcctcgctaaagatcaagaagacccagctgaaggataacacgctgttgttcctgggcgccggagaagcggctcttggtattgccaacctgtgcctgatggccatgaaggtggagggtctcaccgaggaggaggccaaggcccgcatctggatggtggatagccgtggtgtcatcacccgcgatcgtccaaagggcggactcaccgaacacaagctgcactttgcccagctgcacgaacccatcgatactttggcagaggcggtgcgaaaggtgcgtcccaatgtcctgattggagcggctgcgcagggcggcgccttcaaccaggagatccttgagctgatggccgatattaatgagacgccgatcatctttgcactgtccaatccgaccagcaaggcggagtgcaccgccgaggaggcgtatacgtacaccaaggggcgctgcatcttcgccagcggttcgccttttgctcctgtgacgtacaacaacaagaagttctatccgggtcagggcaacaactcgtacattttccctggcgtggcactgggtgttctgtgtgccggcatgctgaacattcccgagcaggtattcttggtcgccgccgagcgcttggcggagctggtctccaaggacgacctggccaagggcagcttgtatccaccactcagctccattgtcagctgttcgatggccattgccgaaaggattgtggagtacgcctacaaaaacggattggccactgttcgtccagagccggtcaataagctggcgttcatcaaggcccagatgtacgatctggactatccccgatccgtgcccgccacctataagatgtagatgatggccagatgatgaggatccattccgcctaaccccagaaaccaaaaggagtggccatcaaaagatatccggcaagggcggcgagcagtaaccatgttatttattttataatgtcgcacatttgtcgtctagcataatatccaaatttgtatcgcggctaattaaccacaaccacacactatccaccaacaaccatattataaaaaaaaaccaactaaaatggaatgtcatcagcttgcggcgcgcgattttgtataatgctaactatgtaaatgggatattgatctaatagatatgtaaacaaattttatgtaatcttgaacaacacaaactattctaaggatatatacaaataaagaaataaacaaaaat

SEQ ID NO: 86 - DNA, 2760 bp, Drosophila melanogaster
aaagctgcagcaacgcagacaaaagtcaaatactcagtgagataattgtcggcaaatcaatatactaataagtatataatatagaagacttttaagagcaccgccatgtactcgatcctacgacgctgttctggtatcagaaaaacttttggacccacgccggtttatcccaccgccaacaattcgcagagtccttcctcatatagtcgcggcaaagagcgcgagctcggctgttacacgaagagaaacagcaacagcaacaacaacaatagccatgagagagagagtcagagctgttgtagtagtcgtgtgtgtaaaaatcatacgaccacaacgacaaccacactcgaatacgaactttccaatttcgcaaaactaacgacacgaatcacaacgcaaagtgccgccgaagtggacacatcgccgcatacggatacggaaacgcatagggacagagattcgaatccgggtaatatagccttagccaccgatttggaactgcccaagggtctgccgttatcgttatcctcgcgacaccactggaatcagctgcagagcagtttgcacgcccttcaccaccagcaacagcaacaacaacagcaactacgttcatacagctccactagcgaaacaaatttggaagacaagatgagcaaacccgattcgaaactagataaatacgcgcagcgcgatcgcctgggcctttggggcactggtgacaatgaggtggtcggcagcctctccggattcacccgactcttggacaagcgctactcaaagggcctggccttcacacacgaggagcgccagcagttgggcatccatggcatgctgccctatgtggtccgtgagcccagtgagcaggtggagcactgccgcgctctgctggcgcgactggatcaggatctggacaagtacatgtacctgatcagcctatcggagcggaacgagcgtctgttctacaacgtgctcagctcagacatcgcctacatgatgccactggtgtacacgcccaccgtgggattggcctgccagcgctacagtttgatccaccagaacgccaagggcatgttcatatccatcaaggacaagggacacatctacgacgtgctaaagaactggccggaaacggatgtgcgtgccatcgttgtcacggacggcgagcgcatcctgggactgggagatctgggcgccaacggaatgggtatacccgtgggcaaactgtccctgtatacggccttggcgggcattaagccatcgcagtgcctgcccatcaccttggatgtgggcaccaataccgaatccatcctggaggatcccctgtacatcggtctgcgcgaacgcagggccactggagatctgtacgatgagttcatcgatgagttcatgcatgcctgcgttcgtcgctttggtcaaaactgcctaatccagttcgaggactttgccaacgccaatgccttcaggctgttgtccaaataccgcgactccttctgcaccttcaacgacgatattcaaggaaccgcgtcggtggccgtggctggtctgctggcctcgctaaagatcaagaagacccagctgaaggataacacgctgttgttcctgggcgccggagaagcggctcttggtattgccaacctgtgcctgatggccatgaaggtggagggtctcaccgaggaggaggccaaggcccgcatctggatggtggatagccgtggtgtcatcacccgcgatcgtccaaagggcggactcaccgaacacaagctgcactttgcccagctgcacgaacccatcgatactttggcagaggcggtgcgaaaggtgcgtcccaatgtcctgattggagcggctgcgcagggcggcgccttcaaccaggagatccttgagctgatggccgatattaatgagacgccgatcatctttgcactgtccaatccgaccagcaaggcggagtgcaccgccgaggaggcgtatacgtacaccaaggggcgctgcatcttcgccagcggttcgccttttgctcctgtgacgtacaacaacaagaagttctatccgggtcagggcaacaactcgtacattttccctggcgtggcactgggtgttctgtgtgccggcatgctgaacattcccgagcaggtattcttggtcgccgccgagcgcttggcggagctggtctccaaggacgacctggccaagggcagcttgtatccaccactcagctccattgtcagctgttcgatggccattgccgaaaggattgtggagtacgcctacaaaaacggattggccactgttcgtccagagccggtcaataagctggcgttcatcaaggcccagatgtacgatctggactatccccgatccgtgcccgccacctataagatgtagatgatggccagatgatgaggatccattccgcctaaccccagaaaccaaaaggagtggccatcaaaagatatccggcaagggcggcgagcagtaaccatgttatttattttataatgtcgcacatttgtcgtctagcataatatccaaatttgtatcgcggctaattaaccacaaccacacactatccaccaacaaccatattataaaaaaaaaccaactaaaatggaatgtcatcagcttgcggcgcgcgattttgtataatgctaactatgtaaatgggatattgatctaatagatatgtaaacaaattttatgtaatcttgaacaacacaaactattctaaggatatatacaaataaagaaataaacaaaaat

SEQ ID NO: 87 - protein, 763 aa, Drosophila melanogaster
MGNSSSICADRNVITNFDENGTPVYPTANNSQSPSSYSRGKERELGCYTKRNSNSNNNNSHERESQSCCSSRVCKNHTTTTTTTLEYELSNFAKLTTRITTQSAAEVDTSPHTDTETHRDRDSNPGNIALATDLELPKGLPLSLSSRHHWNQLQSSLHALHHQQQQQQQQLRSYSSTSETNLEDKMSKPDSKLDKYAQRDRLGLWGTGDNEVVGSLSGFTRLLDKRYSKGLAFTHEERQQLGIHGMLPYVVREPSEQVEHCRALLARLDQDLDKYMYLISLSERNERLFYNVLSSDIAYMMPLVYTPTVGLACQRYSLIHQNAKGMFISIKDKGHIYDVLKNWPETDVRAIVVTDGERILGLGDLGANGMGIPVGKLSLYTALAGIKPSQCLPITLDVGTNTESILEDPLYIGLRERRATGDLYDEFIDEFMHACVRRFGQNCLIQFEDFANANAFRLLSKYRDSFCTFNDDIQGTASVAVAGLLASLKIKKTQLKDNTLLFLGAGEAALGIANLCLMAMKVEGLTEEEAKARIWMVDSRGVITRDRPKGGLTEHKLHFAQLHEPIDTLAEAVRKVRPNVLIGAAAQGGAFNQEILELMADINETPIIFALSNPTSKAECTAEEAYTYTKGRCIFASGSPFAPVTYNNKKFYPGQGNNSYIFPGVALGVLCAGMLNIPEQVFLVAAERLAELVSKDDLAKGSLYPPLSSIVSCSMAIAERIVEYAYKNGLATVRPEPVNKLAFIKAQMYDLDYPRSVPATYKM

SEQ ID NO: 88 - protein, 759 aa, Drosophila melanogaster
MYSILRRCSGIRKTFGPTPVYPTANNSQSPSSYSRGKERELGCYTKRNSNSNNNNSHERESQSCCSSRVCKNHTTTTTTTLEYELSNFAKLTTRITTQSAAEVDTSPHTDTETHRDRDSNPGNIALATDLELPKGLPLSLSSRHHWNQLQSSLHALHHQQQQQQQQLRSYSSTSETNLEDKMSKPDSKLDKYAQRDRLGLWGTGDNEVVGSLSGFTRLLDKRYSKGLAFTHEERQQLGIHGMLPYVVREPSEQVEHCRALLARLDQDLDKYMYLISLSERNERLFYNVLSSDIAYMMPLVYTPTVGLACQRYSLIHQNAKGMFISIKDKGHIYDVLKNWPETDVRAIVVTDGERILGLGDLGANGMGIPVGKLSLYTALAGIKPSQCLPITLDVGTNTESILEDPLYIGLRERRATGDLYDEFIDEFMHACVRRFGQNCLIQFEDFANANAFRLLSKYRDSFCTFNDDIQGTASVAVAGLLASLKIKKTQLKDNTLLFLGAGEAALGIANLCLMAMKVEGLTEEEAKARIWMVDSRGVITRDRPKGGLTEHKLHFAQLHEPIDTLAEAVRKVRPNVLIGAAAQGGAFNQEILELMADINETPIIFALSNPTSKAECTAEEAYTYTKGRCIFASGSPFAPVTYNNKKFYPGQGNNSYIFPGVALGVLCAGMLNIPEQVFLVAAERLAELVSKDDLAKGSLYPPLSSIVSCSMAIAERIVEYAYKNGLATVRPEPVNKLAFIKAQMYDLDYPRSVPATYKM

SEQ ID NO: 89 - DNA, 790 bp, Drosophila melanogaster
ccgttcgctctcttcgccttctcttttctctcccgctttcttctctccacctcttcactgctttgctggtcaatctagccttgtgtgcgtgagtgtgggtgcgcctatcacgatgtacaggtaaacttttattattactaaatgtccagaagtctttaattaaaataattacttattgcgacaataagtaagaaggtgaaatgtaagacttcccaaattgcaataagaacaatagctgtgagagcaataataatcttcagcttttatcactgagcggagcgacataagcaagctgcactgtacttcagatgcaatgttgttgtttcagttgttgtagctgctccttggctttcacacgcgagttgtgggtgagccttaatcacatttattcgatggtgagtggagaaggaggtgctgagtgggcgagggagcggcgccgagagagcgaacgagcggttgacattgacaaccccccttttttgctgttgggagcgggcgcacgcccatgtccagctgcccagcggcagcgaccaggagcgcaggcaggcgcagctcgcggccagcacctacgacgtgctacagcggacgacggacagtatccagcgatccaaccagattgccatcgaaacggagaacatgggggcggaggtactcggcgaactgggcgagcagagggagtcgctgctacgcaccacgcgccgcctggaggacgccgatcaggatctgtccaaatcgagggtcatcattcggaagttgagcagggaggtgctctacaacaagatcatcctaa

SEQ ID NO: 90 - protein, 83 aa, Drosophila melanogaster
MSSCPAAATRSAGRRSSRPAPTTCYSGRRTVSSDPTRLPSKRRTWGRRYSANWASRGSRCYAPRAAWRTPIRICPNRGSSFGS

SEQ ID NO: 91 - DNA, 2713 bp, Drosophila melanogaster
cctctcagctggctcagtgtttttttagtgttcgagctgtgcgtgtgaactgtgatattgcgatattgggctatcgcaattggaaactggacttttggttgaattcattataaacgaaagtgcgctcgttgaatcattaaacaacatttgagcaggcgagttacaattctattaccggttttttttttaaagccaatcgagttttggaggtaattctcgtcggcggagggaacgtaagcagtcgccaagatgggggacatgttccgtagtgaggagatggcactctgccagatgttcattcagccggaggccgcgtatacctccgtatctgagctgggcgaaaccggctgcgtgcagttccgcgacttgaatgtgaacgtgaacgccttccagcgcaagttcgtcaccgaggtgcgtcgctgcgatgagctggagcgcaagatccgctacatcgagacggagatcaagaaggacggcatcgtcctgcccgacatccaggatgacattccgcgtgcgcccaatccacgcgagatcatcgatctggaggcgcatctggagaagaccgagtcggagatgatcgagctggcccagaacgaggtgaacatgaagtccaactatctggagctgaccgagctgcgcaaggtgctggagaacacgcagggcttcttctccgaccaggaggttctcaatctggactcctccaaccgagctggaggagacaacgatgctgctgctcaacaccgtggccggcttggattcgttgccggtgtaattaaccgggagcgagtgtttgcctttgagcgtatgctgtggcgcatctccaggggcaatgtcttcctcaagcgctccgatctggacgagccgctgaacgatccggccaccggacatcccatctacaagaccgtcttcgtggccttcttccagggcgagcaactgaagaaccgtatcaagaaggtgtgcactggcttccacgcctcgctgtatccctgtcccagctcgcacaacgagcgcgaggaaatggttcgcaatgtgcgcacccgcctggaggatctgaagctggtccttagccagacggaggatcatcgtagccgcgtcctggccaccgtgtccaagaatctgccctcgtggtcgatcatggtcaagaagatgaaggccatttaccacacgctgaatctgttcaacatggacgtgaccaagaagtgcctgattggcgagtgttgggtgcccaccaatgatttgcccgttgtccaaaaggctctgtccgatggatctgctgcagtgggcagcaccataccctcgttcctgaacgtgatcgacaccaacgagcagccgccgacctttaacaggactaacaagtttacccgtggcttccagaatctgattgatgcctacggagtggcctcgtacagagagtgcaatcccgccctgtacacctgcatcaccttccccttccttttcgctgtgatgttcggcgatttgggtcacggccttattctggttttgtttggagcttggatggttttgtgcgagcgcaagctggctcgcatccgcaacggtggtgagatctggaacatcttcttcggcggtcgctatatcattctgctgatgggtctgtttgccatgtacactggtttggtttacaacgatgtcttctccaagtcgatgaacctgtttggatcacgttggttcaacaactacaacacaacgactgtcctgaccaacccgaatctgcagttgccgcccaacagctccgccgtgggtgtctatcccttcggaatggatccctttcaagatgaagctctcgatcatcttcggagtgctgcacatggtcttcggcgtgtgcatgtcggtcgttaacttcacccacttcaagcgttatgcctccattttcctggagttcgtgccccaaattctgttcctgctactgctcttcggctacatggtgttcatgatgttcttcaagtggttcagctataacgctaggactagcttccagccagaaactcctggatgcgctccctccgtgttgatcatgttcatcaacatgatgctgttcaagaacactgagccaccaaagggttgcaacgagttcatgttcgagtcacagccccagttgcagaaggcctttgtgctcatcgccctgtgctgcattccttggatgcttctgggcaagcccctgtacatcaagttcactcgcaaaaacaaggctcatgccaatcacaatggtcagttgaccggcaacattgaactggccgaaggcgagactcctctgcccacaggattctctggaaacgaggagaatgccgggggtgcccatggccatgacgatgagcccatgagcgaaatctacatccatcaagccatccacaccatcgaatatgtgctcagtaccatctcgcacacggcgtcctatctgcgtctctgggctctgtccctggctcacgcccagctctccgaggtgctgtggcaaatggtgttgtccctgggccttaagatgtccggcgtgggcggtgccattggtctgttcatcatcttcggcgcctggtgcttgttcaccctggctatcctggtcctcatggagggtctgtccgccttcctgcacactctgcgtctgcactgggtggagttcatgagcaagttctacgagggaatgggctacgccttccagccgttcagcttcaaggccattctcgatggcgaagaggaggagtaa

SEQ ID NO: 92 - DNA, 2673 bp, Drosophila melanogaster
atcgctggcggtgagcagacgtgtgctgcgctccattcagattcagattcgaataaagatactctcgctcggcaacaaacaagttctaaatttatcgctcgcactcgcggggaatcgaatctggtgtgtctttgacataaaaagcgttttcggagctgtgaagggaacgtaagcagtcgccaagatgggggacatgttccgtagtgaggagatggcactctgccagatgttcattcagccggaggccgcgtatacctccgtatctgagctgggcgaaaccggctgcgtgcagttccgcgacttgaatgtgaacgtgaacgccttccagcgcaagttcgtcaccgaggtgcgtcgctgcgatgagctggagcgcaagatccgctacatcgagacggagatcaagaaggacggcatcgtcctgcccgacatccaggatgacattccgcgtgcgcccaatccacgcgagatcatcgatctggaggcgcatctggagaagaccgagtcggagatgatcgagctggcccagaacgaggtgaacatgaagtccaactatctggagctgaccgagctgcgcaaggtgctggagaacacgcagggcttcttctccgaccaggaggttctcaatctggactcctccaaccgagctggaggagacaacgatgctgctgctcaacaccgtggccggcttggattcgttgccggtgtaattaaccgggagcgagtgtttgcctttgagcgtatgctgtggcgcatctccaggggcaatgtcttcctcaagcgctccgatctggacgagccgctgaacgatccggccaccggacatcccatctacaagaccgtcttcgtggccttcttccagggcgagcaactgaagaaccgtatcaagaaggtgtgcactggcttccacgcctcgctgtatccctgtcccagctcgcacaacgagcgcgaggaaatggttcgcaatgtgcgcacccgcctggaggatctgaagctggtccttagccagacggaggatcatcgtagccgcgtcctggccaccgtgtccaagaatctgccctcgtggtcgatcatggtcaagaagatgaaggccatttaccacacgctgaatctgttcaacatggacgtgaccaagaagtgcctgattggcgagtgttgggtgcccaccaatgatttgcccgttgtccaaaaggctctgtccgatggatctgctgcagtgggcagcaccataccctcgttcctgaacgtgatcgacaccaacgagcagccgccgacctttaacaggactaacaagtttacccgtggcttccagaatctgattgatgcctacggagtggcctcgtacagagagtgcaatcccgccctgtacacctgcatcaccttccccttccttttcgctgtgatgttcggcgatttgggtcacggccttattctggttttgtttggagcttggatggttttgtgcgagcgcaagctggctcgcatccgcaacggtggtgagatctggaacatcttcttcggcggtcgctatatcattctgctgatgggtctgtttgccatgtacactggtttggtttacaacgatgtcttctccaagtcgatgaacctgtttggatcacgttggttcaacaactacaacacaacgactgtcctgaccaacccgaatctgcagttgccgcccaacagctccgccgtgggtgtctatcccttcggaatggatccctttcaagatgaagctctcgatcatcttcggagtgctgcacatggtcttcggcgtgtgcatgtcggtcgttaacttcacccacttcaagcgttatgcctccattttcctggagttcgtgccccaaattctgttcctgctactgctcttcggctacatggtgttcatgatgttcttcaagtggttcagctataacgctaggactagcttccagccagaaactcctggatgcgctccctccgtgttgatcatgttcatcaacatgatgctgttcaagaacactgagccaccaaagggttgcaacgagttcatgttcgagtcacagccccagttgcagaaggcctttgtgctcatcgccctgtgctgcattccttggatgcttctgggcaagcccctgtacatcaagttcactcgcaaaaacaaggctcatgccaatcacaatggtcagttgaccggcaacattgaactggccgaaggcgagactcctctgcccacaggattctctggaaacgaggagaatgccgggggtgcccatggccatgacgatgagcccatgagcgaaatctacatccatcaagccatccacaccatcgaatatgtgctcagtaccatctcgcacacggcgtcctatctgcgtctctgggctctgtccctggctcacgcccagctctccgaggtgctgtggcaaatggtgttgtccctgggccttaagatgtccggcgtgggcggtgccattggtctgttcatcatcttcggcgcctggtgcttgttcaccctggctatcctggtcctcatggagggtctgtccgccttcctgcacactctgcgtctgcactgggtggagttcatgagcaagttctacgagggaatgggctacgccttccagccgttcagcttcaaggccattctcgatggcgaagaggaggagtaaacccatccaaatgtgctcaaactag

SEQ ID NO: 93 - protein, 535 aa, Drosophila melanogaster
MGDMFRSEEMALCQMFIQPEAAYTSVSELGETGCVQFRDLNVNVNAFQRKFVTEVRRCDELERKIRYIETEIKKDGIVLPDIQDDIPRAPNPREIIDLEAHLEKTESEMIELAQNEVNMKSNYLELTELRKVLENTQGFFSDQEVLNLDSSNRAGGDNDAAAQHRGRLGFVAGVINRERVFAFERMLWRISRGNVFLKRSDLDEPLNDPATGHPIYKTVFVAFFQGEQLKNRIKKVCTGFHASLYPCPSSHNEREEMVRNVRTRLEDLKLVLSQTEDHRSRVLATVSKNLPSWSIMVKKMKAIYHTLNLFNMDVTKKCLIGECWVPTNDLPVVQKALSDGSAAVGSTIPSFLNVIDTNEQPPTFNRTNKFTRGFQNLIDAYGVASYRECNPALYTCITFPFLFAVMFGDLGHGLILVLFGAWMVLCERKLARIRNGGEIWNIFFGGRYIILLMGLFAMYTGLVYNDVFSKSMNLFGSRWFNNYNTTTVLTNPNLQLPPNSSAVGVYPFGMDPFQDEALDHLRSAAHGLRRVHVGR

SEQ ID NO: 94 - protein, 535 aa, Drosophila melanogaster; identical to SEQ ID NO: 93

SEQ ID NO: 95 - DNA, 1994 bp, Drosophila melanogaster
tgaacacgaacagttattctagctcctcctgttctgctgcttctgttggtgtttttttgcgtttgccgcgacgtaaacaaccgaagagcggagcttacgcccccaactgctccagctccacgcccccctcgcaacgtgttcgttgtaaatgcaattaatcgttgttggtcgctgaaaaaactaatatttcgggagtccgatacaagaagggcaaaaaagcacaagtgcagaaaaagcaaaaaaaaacataagcttgccgtgtgtgtgcgttggtgtgtgtgtgtatttttggcgtgcgcggccattttttcttgttgccactcgagagtctcttctgtgtgcgaaagagaggcccgacggcaaagcagaacgtagcaaactacgcaaatccccactaaattcgctaattttcgctaaataaatcaatcgcaaggggtgcccaaaaacaaacaaaagtacgaaaatagagtgccgcagaccacaaacaaatcacctgcgccagtgtgtgtgagtgtgtcagtgtgcgaaacaggcaagctcccaggcgggctcccacccacaatcagtcggcgaacacgtgctccaaaatatcaacaaaagttggcccacaaacataaaaaagggggccgcgactgcatccgagacccgaacgccggaacacaaaaggcactttcaaattgcacaaaaacgcgccgagttgtgtaagcccgccgccagtgaagtgtcgacttcccggcgacgaagaccgcagcaatatttccactagccagtaacgcacaggctcgttccgccgctgacgacgaccccaaactggacgcccgcaccatcgcctaccgcccgctgacccttggcggccaccagacgccgcttatggccgaactgccgacggcgccgaacggcgtccccagcggcgattatctgcaccgctccatcgatcagctgcgttcgctgggtcatctgaccaccgcccaattggttcacgactacaagcccttcaacattagcgaattccggcagaatgtcgctgagcgactggactactcgctgaagaacggcctggtgcagcaccaacagcaaatggtcatggagcagcagccacatcccgatcagcagcagcagcagcatctgcatcacccgcaacagcagcagcacccgccgcagctgaaggtcagctacagtgcgcccaactcgccgcccactccacacgagcagcaggaacagaagtacgacccgaatcgatcgccgccgcgtcagcagatgagcagcgctagcggcagtggcagcaacggctcctcgcctgaggaggaaagccgacggggagacggtgatcaggccaagccctacaagtgtggctcgtgcagcaagtcctttgccaactcctcgtacctgtcgcagcacacgcgtatccacctggggatcaagccgtaccgctgcgagatatgtcagcgcaagttcacgcaattgtcgcatctccagcagcacatccgtacgcacacgggtgacaaaccgtacaaatgccggcacgccggctgcccgaaggccttctcgcagctatccaatctgcagtcacactcgcgttgtcatcagacggacaagccgttcaagtgcaactcctgctacaagtgcttcagcgacgagatgaccctgctggagcacattcccaagcacaaggactccaagcacctgaagacgcacatctgcaatttgtgtggcaaatcgtacacgcaagagacctaccttcagaaacatctgcagaagcacgcagagaaggcggagaagcagcagcatcgccacacggcccaggtggctgcccaccagcagcacgtaccggcgagcggcatcggcttgaatttgcagcgccaggccatgaacgatgtgaatgccgcatattgggccaaaatgggcgcagacagtgcggcggcttcgctggcggaagccattcagcagcagttgccgcaggccggcgaataaagattgtaactatatataaaagt

SEQ ID NO: 96 - protein, 366 aa, Drosophila melanogaster
MAELPTAPNGVPSGDYLHRSIDQLRSLGHLTTAQLVHDYKPFNISEFRQNVAERLDYSLKNGLVQHQQQMVMEQQPHPDQQQQQHLHHPQQQQHPPQLKVSYSAPNSPPTPHEQQEQKYDPNRSPPRQQMSSASGSGSNGSSPEEESRRGDGDQAKPYKCGSCSKSFANSSYLSQHTRIHLGIKPYRCEICQRKFTQLSHLQQHIRTHTGDKPYKCRHAGCPKAFSQLSNLQSHSRCHQTDKPFKCNSCYKCFSDEMTLLEHIPKHKDSKHLKTHICNLCGKSYTQETYLQKHLQKHAEKAEKQQHRHTAQVAAHQQHVPASGIGLNLQRQAMNDVNAAYWAKMGADSAAASLAEAIQQQLPQAGE

SEQ ID NO: 97 - DNA, 411 bp, Drosophila melanogaster
atgactgatctgtcgccgaccacctctgggtttctacatggccatggcggcgccaacgcacagcatcaccagcaacttttgcaccaccaacagcagcagcatcagcagacccaccagcagcacctccagcagcagtaccaccaccggcagcactcgctccaccagcagcacctgcagcgccagcactcgcacacctcgctgaccaagatccaccgccagagcagcagccacagcgtccacggtggtggcgggcgggcggatcaccaccgaaccactaccggagccaccggacggctcttctcctacttcggaaacgagcaggatcacgagcgcaagaagtcggagacttcgttctttaatctcggatttcggaggaagtccactgtggtctactacgctccagcggattga

SEQ ID NO: 98 - protein, 136 aa, Drosophila melanogaster
MTDLSPTTSGFLHGHGGANAQHHQQLLHHQQQQHQQTHQQHLQQQYHHRQHSLHQQHLQRQHSHTSLTKIHRQSSSHSVHGGGGRADHHRTTTGATGRLFSYFGNEQDHERKKSETSFFNLGFRRKSTVVYYAPAD

SEQ ID NO: 99 - DNA, 2022 bp, Drosophila melanogaster
atggcggaaggtaatggcgaactgttggatgacattaaccagaaagccgatgaccgtggcgatggcgagcgtacagaggattatcccaagctgctggaatacggtctggacaagaaggtcgccggcaaactggatgagatctacaaaaccggcaagttggctcacgccgagctggacgagcgcgccctggacgcgctcaaggagtttcccgtcgatggtgccttgaatgtgttgggacagttcctggaatcgaacctggagcacgtgtcaaacaagtccgcctacctatgcggcgtgatgaagacgtaccgacagaagagtcgagccagccaacagggcgtggccgcgcccgcaactgtcaaaggtcccgacgaggacaagatcaagaaaatcctcgagcgcaccggctacacattagatgtgacgacaggtcagcgtaaatacggcggaccgccgccgcattgggagggaaatgtgccaggcaacggttgcgaggttttctgcggcaagatacccaaggacatgtacgaggacgaactgattccgctattcgagaactgcggcataatctgggacctacgactcatgatggacccgatgacgggcacaaatcgtggttatgcatttgtcacattcacaaatcgcgaagcggccgtcaatgcagtgcgacagctcgataatcacgaaataaaacccggcaagtgtctaaaaataaatataagcgtaccgaatctgcgccttttcgtaggcaatattcccaagtcaaagggcaaagatgaaattttagaggaatttggtaaacttacaggcaaaaagattggtgttacgatatcatttaacaatcaccggctatttgtcggcaatatacctaagaatagagatcgcgacgaattaattgaggaattttcaaaacatgcacctggcctatacgaggtaatcatatacagttcgccagatgataagaaaaagaatcgcggcttttgctttcttgagtacgagtcacacaaggcggcgtctttggccaaacgaagacttggcacaggaagaattaaggtttggggatgtgatataatagtcgactgggccgatccacaggaggagccggatgagcaaacaatgtccaaggttaaagttctttatgtgcgaaatcttacccaggacgtctcagaggataaactgaaggaacaatttgagcaatacggaaaagtggaacgcgttaagaaaattaaagactatgcctttatacactttgaggatcgtgatagcgccgtcgaagctatgcgtggccttaatggcaaggagatcggcgcctcgaatattgaggtctctctagccaaacccccctcggacaaaaagaaaaaggaggagattctgcgtgctcgtgagcgccgcatgatgcaaatgatgcaagcgcgtcccgggatcgtgggaaacctgtcgccgacacatcctagcataatgtccttgacgcccatgcgcccaggggcgcgcatgccgctgcgtacgccgataccccgtgaatacgactacttttacgactttttcggtttctcggactatcgccaaggggggtcctttggcaataatgtgtcctactacgatgacatgtaccgctggattgatggggattacaactactatgattacccgaacggtggcggcgggggcagcgggggaggaggaggtagtgtgtccggcggtacggtgcttccgctctcggccggcggctcccagaattcaccgatggctagtggacagcgatcggccagaggatcggccagtggtcccagtgcttccccgagccttatgctggagctgcattcaaaacattcatggagggtaattaagcgtagctcatcggccacctccttggacagcgacaagagtcgctctccggggaagaagcgtaaagtccataggtcacataacaaaaacaagtcacacaagtctaagaagcatgcccacaagtccaagtcgtctcggcccgataaagaaaagaaatccaagcggaagtccgaataa

SEQ ID NO: 100 - protein, 673 aa, Drosophila melanogaster
MAEGNGELLDDINQKADDRGDGERTEDYPKLLEYGLDKKVAGKLDEIYKTGKLAHAELDERALDALKEFPVDGALNVLGQFLESNLEHVSNKSAYLCGVMKTYRQKSRASQQGVAAPATVKGPDEDKIKKILERTGYTLDVTTGQRKYGGPPPHWEGNVPGNGCEVFCGKIPKDMYEDELIPLFENCGIIWDLRLMMDPMTGTNRGYAFVTFTNREAAVNAVRQLDNHEIKPGKCLKINISVPNLRLFVGNIPKSKGKDEILEEFGKLTGKKIGVTISFNNHRLFVGNIPKNRDRDELIEEFSKHAPGLYEVIIYSSPDDKKKNRGFCFLEYESHKAASLAKRRLGTGRIKVWGCDIIVDWADPQEEPDEQTMSKVKVLYVRNLTQDVSEDKLKEQFEQYGKVERVKKIKDYAFIHFEDRDSAVEAMRGLNGKEIGASNIEVSLAKPPSDKKKKEEILRARERRMMQMMQARPGIVGNLSPTHPSIMSLTPMRPGARMPLRTPIPREYDYFYDFFGFSDYRQGGSFGNNVSYYDDMYRWIDGDYNYYDYPNGGGGGSGGGGGSVSGGTVLPLSAGGSQNSPMASGQRSARGSASGPSASPSLMLELHSKHSWRVIKRSSSATSLDSDKSRSPGKKRKVHRSHNKNKSHKSKKHAHKSKSSRPDKEKKSKRKSE

SEQ ID NO: 101 - DNA, 1017 bp, Drosophila melanogaster
atgatgaaactgttcctggccttggccttttgtgtcctggcggctaatgccgtggaggttcgtgtgaatggtgagaacggatggtatgtgccccaggccgatggtaccatggagtggatggaccgcgagttcgccgaggcctatttggagaccaagaaccgcatggaaggacgcaacgtcctgaaccccgtcaccttctacctgtacaccaactcgaaccgcaactctccccaggagatcaaggctacgtcagcatcgatctctggctcgcacttcaaccccaaccaccccacccgcttcactatccacggctggtcctccagcaaggatgagttcatcaactacggtgtccgcgatgcctggttcacccacggcgacatgaacatgattgccgtcgactggggacgtgctcgttccgtggactacgcctcctccgttctggctgttcccggagtcggcgagcaggtggctaccctgatcaactttatgcgcagcaatcacggcctgaacctggacaacaccatggtgattggtcacagcctgggcgcccatgtctcgggctatgctggcaagaatgtgaagaacggccagctgcacaccatcattggtctggaccccgccctgccccttttcagctacgattcccccaacaagcgcctgagctccaccgatgcttactacgtggagtccatccagaccaacggaggaaccctgggattcctgaagcccatcggcaagggagccttctaccccaacggaggaaagagccagcccggatgtggtgttgatctcaccggatcctgcgcccacagccgctcagtgatctactacgccgagtccgtgaccgagaacaacttccccaccatgcgctgcggcgactacgaggaggctgtggccaaggagtgcggtagctcctacagctccgtccgcatgggagccaccaccaatgcctacatggtcgctggagattactatgtacccgtccgtagcgatgctccctacggaatgggcaactaa

SEQ ID NO: 102 - protein, 338 aa, Drosophila melanogaster
MMKLFLALAFCVLAANAVEVRVNGENGWYVPQADGTMEWMDREFAEAYLETKNRMEGRNVLNPVTFYLYTNSNRNSPQEIKATSASISGSHFNPNHPTRFTIHGWSSSKDEFINYGVRDAWFTHGDMNMIAVDWGRARSVDYASSVLAVPGVGEQVATLINFMRSNHGLNLDNTMVIGHSLGAHVSGYAGKNVKNGQLHTIIGLDPALPLFSYDSPNKRLSSTDAYYVESIQTNGGTLGFLKPIGKGAFYPNGGKSQPGCGVDLTGSCAHSRSVIYYAESVTENNFPTMRCGDYEEAVAKECGSSYSSVRMGATTNAYMVAGDYYVPVRSDAPYGMGN

SEQ ID NO: 103 - DNA, 204 bp, Drosophila melanogaster
cagcgcctccgaattttggccaatgcgtgtgctcctggcgttcaatgctgaccatgtcgaccctgatgatgccagcaccgaccatagccatgggtgccccgcagatcacaatgggtccgcacaagccgccggaaacgaagctgttggccatccatcccgctgcagcggccgcagcagccgcccagcagcagcagcagtcggtga

SEQ ID NO: 104 - protein, 53 aa, Drosophila melanogaster
MLTMSTLMMPAPTIAMGAPQITMGPHKPPETKLLAIHPAAAAAAAAQQQQQSV

SEQ ID NO: 105 - DNA, 2902 bp, Drosophila melanogaster
caacctgcaatttagttttctgtttgttgttaaacatctaacaaaagcgcttcgcacgcacagcaaaccggtcgattccgaattcagacgtgctaaataacgtttgaaaacaaaatttgctcggttgacgttgtaaataacaacacggaggctttaaatctggcttcatctttttttttttggtaaaaaccagcaacaaacaaaaccagcaacgagtgtgtatgggtgaaaagttaagaaaaaagtaaaagaagtttaagaatattagcacagaaacgcacaaatacatagatacgtataggaaaaggagcgcgcggtaaaacaaaaaagaagaggagcaaaaagaagaaaatcgccgactgcgaaaacggcgacaaagtgaaattgattataaacggataatttatttaaaataattaccaatcagcggcgtcagttataaataattaagaaagtcaagaagaaaagcagcagcagcacaccacacacacatcggcagcgaaaatggcaacacttaacaaattcacaaaaacgctgtccattgatgaaaaggcggagatcaaggagaaattcatagagttggatgccaacaaagatggcttcatcgatctgcacgagctaaaggatgccctcaaccaggtgggcttcaagctggccggctaccaggtgcgcgaaatgattgacgagtacaagggcaaacagctgactgccttccagggcaaattgaatctggaggagttcgaggcactgtgcctggacctgaagagcaaggatgtggccagcacattcaagacggtcgtctccaagaaggagaacttggagaccctgggcggcatgtcgagcatttcgtcggagggcaccacccattcggtgcgcctcgaggagcagctggccttctccgactggattaactcgaatctgggccacgacaaggatctgcaacatctgctgcccatcgatagcgagggcaagcgcttgtatctgagcatcaaggatggtattctgctgtgcaaaattatcaaccactcctgcccggacacaatcgatgagcgtgcgatcaacaagaagaacctcaccgtctaccgggagtttgagaacttgaccctggccttggtttcctcccaggcgattggatgcaacatcgtaaacatcgatgcccacgatctggccaagggcaagccacatctggtgctgggtcttctctggcagatcatccgcatcggtctgtttagccacatcaccctggacagctgtccgggattggctggcctactcttcgacaacgaacgtctcgaggatctgatgaagatgtcgccggaggccatccttttgcgttgggtcaaccatcatttggagcgagccggcatctcgaggcggtgcaccaacttccagtcggacatcgtcgattctgagatctattcgcatttgctgaagcaaattgccggcaatgatgctgatgtcaatctggatgccctgcgggaatccgatctgcagtcgcgcgcggagatcatgttgcagcaggccgccaagctcaactgccgcagcttcctcacgccacaggatgtcgtcaacggagtctacaaactcaatctagccttcgtggctaatctgttcaacaaccatccaggattggacaagcccgagcagatcgagggactcgagtccattgaggagacgcgcgaagagaagacctaccgcaattggatgaactcaatgggcgtggcaccgcacgtgaactggctttactccgatttggccgatggtctggtcattttccagctgttcgacgtcatcaagccgggtattgtcaactggagccgtgtgcacaagcgtttcagcccgctgcgcaagttcatggaaaagctggagaactgcaactatgcggtggatctgggcaagcagctcaaattctcgctggtcggaatcgcaggccaggatctaaacgatggcaatgccacgctgacgttggctctcatctggcagcttatgcgtgcctacaccctgtccattctgtcccgcttggccaacactggcaaccccattatcgagaaggagatcgtccagtgggtgaataaccgactgtcggaggcaggcaaacagtcgcagctgcgtaacttcaacgatccggccatcgccgatggcaagatcgtgatcgatctgatcgatgccatcaaggagggcagcattaactacgagttggtgcgcactagcggaacacaggaggataacctggccaatgccaagtatgccatctccatggcccgcaagatcggcgcccgtgtctacgccctgcccgaggacatcaccgaggtgaagccgaaaatggtgatgaccgttttcgcctgcatgatggccctcgactacgtgcccaacatggacagtgtggaccagaacaaccacaacagctccgccaacaacagcaattaggcgccatagccacaactcatttatacataaacaaaaggatgggattttgaaagggaagaacagagtgggaactacgtaaatttgtcgtattcgctaattactaataactctattcgattgcgttccttcctgcgctaccaatacatttttgtgttttttttttatttcaattactttttgtaatttttttattatatatttatatattatataattgagtatgagtttccccctattgtaattaagcaaacagattttagagtgtcgcacatctgttttcgagcccggcggggtgtttcttaattagttttgtttaacaattgattaattatacaactgtaaccttattttataaataaaggtttagcttgttccgcttaaaatccttaaaagaaaagaatggtgaaacaaaagaaagaaaaaaaaagcgacttgtgcaggattaagaaagaattataatattaacattgcgacg

SEQ ID NO: 106 - protein, 640 aa, Drosophila melanogaster
MATLNKFTKTLSIDEKAEIKEKFIELDANKDGFIDLHELKDALNQVGFKLAGYQVREMIDEYKGKQLTAFQGKLNLEEFEALCLDLKSKDVASTFKTVVSKKENLETLGGMSSISSEGTTHSVRLEEQLAFSDWINSNLGHDKDLQHLLPIDSEGKRLYLSIKDGILLCKIINHSCPDTIDERAINKKNLTVYREFENLTLALVSSQAIGCNIVNIDAHDLAKGKPHLVLGLLWQIIRIGLFSHITLDSCPGLAGLLFDNERLEDLMKMSPEAILLRWVNHHLERAGISRRCTNFQSDIVDSEIYSHLLKQIAGNDADVNLDALRESDLQSRAEIMLQQAAKLNCRSFLTPQDVVNGVYKLNLAFVANLFNNHPGLDKPEQIEGLESIEETREEKTYRNWMNSMGVAPHVNWLYSDLADGLVIFQLFDVIKPGIVNWSRVHKRFSPLRKFMEKLENCNYAVDLGKQLKFSLVGIAGQDLNDGNATLTLALIWQLMRAYTLSILSRLANTGNPIIEKEIVQWVNNRLSEAGKQSQLRNFNDPAIADGKIVIDLIDAIKEGSINYELVRTSGTQEDNLANAKYAISMARKIGARVYALPEDITEVKPKMVMTVFACMMALDYVPNMDSVDQNNHNSSANNSN

SEQ ID NO: 107 - DNA, 5294 bp, Drosophila melanogaster
tgtattggaaacgcggcttaacttaatgcagatttttccgctgattcggctgcgaaagatgcacttttaaggcgcagcgagtgcacccacgccccgagttcgagtgcagttgcagtcgggaaagcttgacaagtgcgcggagcaaggagagcgacgagttcgttgagctacagcgaaacggaaaagtgtaaaagcggggtaaacaggcgcagcggagcggatgataaacggaactcgggatcggaaaattggaagcaaaaccaaccaccgattataaaaaatagtcagcatcttaaaaacttggtctttgggtcgagatgtagagctggatagtgtgccacactatataggggatactactgcgatacagacaccgcggacacggctgacatgcattaatgctgcgaataatgcctattgcagacggggataatggagtcacagaagcggccttcgttggacttacacacggatgtgccagcaggattagcagctggaggatctggcctgggagctgcagctgagatgtcgcccacttccggtttcctgccggacatgccgcagtggaagaaggacctcatccagcgccggaaaacgaacgtggcccgcacccaggcggcgtccatcacctcgcccaccgatggcagttgtggggctttggcagaagccaacgcagctccaggtgcaattgcagatttcacagaaccggcgacaatcagtagcactagtcaaaagagaaacatgatcggttcagaggaaaagtctgagaaatcttctatttccaataccaattccgattccactggaggtcatcactctgttgttgccgtctccctttcgcccgatgcggcagcaacaacaaatgtaacagtaacaccaataccaaagcagcgatcgagtttactcaacacaagaagtcaggagagggagatggtgcgatatattctaagcgagagtggagaacgggatggagagcttgagagcggcgaacagccggctggtgtggtgagtaacagccggtgcggtgaagttgaaactggcacaattggatcgccgtcgtcgtcagcaaatcaaaatccaaacccaaatcatttaaaaacgaaatgcaaaccgggacagagcgttgctgagggcaagccttcagctaaagagaccatcgtcgataacagcaaaagctgcagcaaaaccaagagtatttccgataaattgcagagcaacaagtttataattcaacagcagcagcaacaacaacaacaacagcagcaacaacagcaactgtcgcccacaaaggtaacggtaaaaccgacaatggtcgccatgcaagagatgaagaagacaaccaaacaaaatggccagcaccgacatctagcgggcaaaattggcagcgtagcaggaggcgatgtggatccacaacatccaccgacgaatcccataccagattcattggacaccggtgaggatctgagctacggacccggaattgtgtccaagctgcgatgccgctacttgagcctggcccttcgcgagtcccgccagcagagcagcaaacaacgcctccaacgctccaccagtctgaacaccctgctcgaccgcgacgatgacgaggtggaagtggaggagcccgaaatgaccaacagccaggtgcgtgccaaatcaacaccgccaccgatattgggggcaaaaccgacaccgaaacccagcagccagcatcagcgtcccgtcagtctgggcgccaatggagctggatcagctgttaacccgccctcgaactcggatcaggcccaaacgggcgccgttgccaacggaggcgcaggatctggccaacgttcgcgtcactttaagcgcggcaacgaggtgatgaagcgggcacgttccgtggaggctctgctctgcgagaaatcgccatggaacagccagagaatcagcactgccggcgcagctgcagcagcagcaccttcaccacctgctcccaaggccacagccgctgctccctcacctgttacatcgcccacctgcgttaccatcgaggacaagatccacaatgcccgcgaacgactgcacagcgggacggatacggcgccacccaagcgtctgacctccatcatcgatgacaccgagcggccgccaccggatctggtcaagcagacgctcaagatgtttgaggcgagtgctaatcgacgaccgcgcgcagcccatcgttccaatggtgttggcggagtggccagcaaggtggccaactacaaatcgatcattaaggatcagaagcaaccatcatcagcagcggcgacgccaccgccgaccggcatgggttttgcctcctcaacgccgctaaggcatgtccatccggatattataccccgtcaggtggattcgcccgtatcggcgttgagtgtaatgatgcgtcgcatggagctgcaggagcccgagacgccggaaagggagacacgggacgcggaggccacaccgcagagcgaggcgctaagtgagactgagcgaaatgatcgcgatgaaggcgatggcgaagtcgatgacgacaaccacaacaacaacgacgacgatcacgacgacggcgacgacggcagcgacaacaatgagcaacgcgataaaatgggcgcggcggcggcaggcgataagcctaagcccccagcggaatcggcagcgggaggcgcccaacgatcattcgctgcctcgacggagaacgcgcatgtagccagcggtagtagcagcagtaccagtgccagtgtacggaagctcagcaacaacaacgactccagcagcggaccagcggtgaccaaacagatcggtgtcatccgtccgctattcaatagccagggagccgggagcacgccgctaacgagtcgcgagatcgaaaagaatcgcatcaatgagatgaagaagtcgacggccacagatgccggtggttcggtatccggatccggaacggttgctggtgctggatcaggaacctcgcccaccactagtctcgacagcgtgataaacaccaaggaagcggccagcagcgaaacggatgccagtgcctcgccactgtggacattgcgcaagctgaggaatcagagccagacggccggcggaggatcgggtcccagttcgagccttcattccacagagaacacctcgatggtgttcaacttttccaagagcaccaaggaagtgcccgactacatcgaaagcgacgttgtgatttacaggcgcaagcgggagctgccaaagccaaatgaacctggcttcgtgctcctgggcgatctctccgtggagacgtcgacggacacggactacgacgactactccatgtgcccgccatcgccgtgcgatgtggagtttgagaatgccaacattgtgatcgacggcaagtccagcatacgccagaaacccaaagagtcttcgttccgcgtgcagttcaacgacacgctgacgtcgacgtttgaatacccctccgaggcatcgatgaccatcgaggatccgccgtacgccgatccctttggccatgtgagcaaacaccatcagatgctgctcgccgagcagatgcatctgttgcagcaccaggagcagctggagctggagcagatgcaccagctggggctggcgccggagcagcaccatcatgtgaccgtcgacgagatcatcgagctgcccacatcgacggcgggacatggacatggcatcggacttggacacaggtcgggggcggcggggggcggtggcacgatgctggggaatttaccgttggatattatttaaatgtaacagaatacataagcaaagcgttgaaataatatctattgtataccaaaaccaaaaatatctatgataacaaacaagcaaaggcaattaaaccgatccgtaaactgaataaccgattaataactgcagccgctcaacccgaaccgcaataaataactatcaagtaaagaatagaacaacttaacaatgaaaaatgcaatattcaatatgcgaaatgacaaatgcctaatgccaaatgccaatccaaataacccaataaccgattcaagtgcgagaacagaaatgccacacctctaacccagtgcacttgctctgtctgctccgctgggcaatcaaactaatcgccaattcatattattattaaggctccacggctctgggcttctacacgcccatgaagggcacggcgatggacaacctattccagctgggtgtcacccgatacgccctgcccgagagcagcagcagtgggagcagcaatggcagccacagtccaggcagcaacgggagcagtccagccggagctgcgggcagccggttgatgttcaacgggaatggcagcattatgggcatcggcgagggactgatcaaggagggcgacttggcggcaacggaagcaggacctggaactgcagatggagcaggtgcctccaagaagggttcagctgtggacgaggatgattaccatctgacggcgacgccgggcgccgaagttgtgtacagcgagggtacacagaaaacggatttgctatattaggtcgtcctgccagccaaaaaaccggagcgtctagctctttttctaccggtttccaccaaactccaaaccttccgagcataacaacctaccacatcctgatcgttcccctaattgaaaagcgtgcacttaggtgaaatatcaacttcggttagacgcgaaaacagtaacgaaggaaagaaaaataaaaacaacaaggcaacgtaaaccaagtatggcaagaaatccataaagatacgtatataaatagatattatttgtaagtttgtaagcctagagatccgatgtgtatgtgtacaacagcaagcgtgtgtgtctgtcttctttataaatatatatatatggttttttttttttgataaattaataattatattattgtaatgtatctacatacggcactgaatgaacaactttgctgctgcaattgtatttgtatttgtattgtgtattccatttacggcattttgatagtaaatatacaacaacaacaaatcaacgtatttccgactgcatcccgaaggttactgaaaccttaatccacgaagtacgcgacgagcggttagtcccgcccgagtattaacttaatggattctaacgatccgatcttgtgacccatcatcatcccttttcgcgacccttccaaaacgaaaatgaagaacattctaagctccgcttgcccattcagcggaagaaagcaaaggaaaatgtaacatttgcctcataattattatatacatttagcgcttattgaatattttttacaattgtattccgt

SEQ ID NO: 108 - protein, 1108 aa, Drosophila melanogaster
MESQKRPSLDLHTDVPAGLAAGGSGLGAAAEMSPTSGFLPDMPQWKKDLIQRRKTNVARTQAASITSPTDGSCGALAEANAAPGAIADFTEPATISSTSQKRNMIGSEEKSEKSSISNTNSDSTGGHHSVVAVSLSPDAAATTNVTVTPIPKQRSSLLNTRSQEREMVRYILSESGERDGELESGEQPAGVVSNSRCGEVETGTIGSPSSSANQNPNPNHLKTKCKPGQSVAEGKPSAKETIVDNSKSCSKTKSISDKLQSNKFIIQQQQQQQQQQQQQQQLSPTKVTVKPTMVAMQEMKKTTKQNGQHRHLAGKIGSVAGGDVDPQHPPTNPIPDSLDTGEDLSYGPGIVSKLRCRYLSLALRESRQQSSKQRLQRSTSLNTLLDRDDDEVEVEEPEMTNSQVRAKSTPPPILGAKPTPKPSSQHQRPVSLGANGAGSAVNPPSNSDQAQTGAVANGGAGSGQRSRHFKRGNEVMKRARSVEALLCEKSPWNSQRISTAGAAAAAAPSPPAPKATAAAPSPVTSPTCVTIEDKIHNARERLHSGTDTAPPKRLTSIIDDTERPPPDLVKQTLKMFEASANRRPRAAHRSNGVGGVASKVANYKSIIKDQKQPSSAAATPPPTGMGFASSTPLRHVHPDIIPRQVDSPVSALSVMMRRMELQEPETPERETRDAEATPQSEALSETERNDRDEGDGEVDDDNHNNNDDDHDDGDDGSDNNEQRDKMGAAAAGDKPKPPAESAAGGAQRSFAASTENAHVASGSSSSTSASVRKLSNNNDSSSGPAVTKQIGVIRPLFNSQGAGSTPLTSREIEKNRINEMKKSTATDAGGSVSGSGTVAGAGSGTSPTTSLDSVINTKEAASSETDASASPLWTLRKLRNQSQTAGGGSGPSSSLHSTENTSMVFNFSKSTKEVPDYIESDVVIYRRKRELPKPNEPGFVLLGDLSVETSTDTDYDDYSMCPPSPCDVEFENANIVIDGKSSIRQKPKESSFRVQFNDTLTSTFEYPSEASMTIEDPPYADPFGHVSKHHQMLLAEQMHLLQHQEQLELEQMHQLGLAPEQHHHVTVDEIIELPTSTAGHGHGIGLGHRSGAAGGGGTMLGNLPLDII

SEQ ID NO: 109 - DNA, 6751 bp, Drosophila melanogaster
aatcgttagcccagctctaaaatagtgtttctcttctctcgtgtagaaaaacagagaaattaaactttttcgcgcatttcgccattgcaaaaattgaaattcgcgatcgcgttcgtttaccctgcaaattgcacaactacgcgctctcgattggcgccgatttagcggagaatcgcgaaatcaaagaaatattcgcagcaagaagaagaacggaacggccagtataatcgtattgttgtttgtgttggtgttagttgtgtgtgtgtttgtgggtgttgttgttgctgctgctactgcttctgggatgatgctgtaaagtaaaagtggtggcaaaagcactaagcccgtggtgcgacgcaaaaaacacgctgcagttagcggccaggcggaaaatgataagagtgatggtggcttgagccccgagtaatcgctaaaatatcgagcacacagttcgtgcaaatcaaattgcgccaataagcaaaagcaaacgcaaacatcgtttgttttattgcattccacgcacacacacacctatatatatgcacacgcacgcagtcgcatacatatgcgctgcagcagcaacagagatttttttatttgaccacactcactcacacacgcaaccacatgcatccacgcagcaaacggataacaacaaaaacaaagagagcagccaaatgtttcgcctgagtgaccacatcaccaaggattagagtcagcaacacggagttagaggataccagaagcagcaaaggaaccaccgctagcgaagatgtcgcgctggggcaagaacatcgtggtgccgctggactcactctgcaaggagaaggagaacaccaaccggcccactgtcgcccgttccgtgggcaccgttggcaagtggggcaagatgggcttcacctccacgcgcacctacaccctgcccgccatccatcctatggctgcggcagcggcggctgctgcagcagccgccagtccctcccagagtcccgcctccacgcaggatcacgatcccaacgacctgtccgtttcggttccggagccgccgaagccgaaaaagttcttcaaatcgaggaatacagctccgccggaggtcatagctcagatcattcagcagctaccgcactgtggagccggcgcatcacccatgcgagaccatttctcgtcggcgggtgcgggtgctggtggtctcacgcctacttccggtgcccaggaggcgggcggagtgaagctgaagccgggcaagggcgccagttccgcagagcggaagcgcaaatcgccgaaaaagaaggcagcaacaacgtcagcctccacgccctcgacgcctggtgcgttctacggcgcctccgatcgagatggcgatgggctaagcgatcccgcctcagagcagccggagcaaccgtccagtgcctcgggcaagcagaagcagaagaagccgaaggaggagaagaagctgaagccagaggcgccgccttcgcgggtactgggacgcgcccgcaaggctgtcaactaccgcgaagtggacgaggacgagcgctatcccacgcccaccaaggatctgatcattcccaaagcggggcgccaaccggctgaagtggcggctacggcaacacttgccgccgcttcgtcggaagccttcatcagttccacgtttggcagccctggatcggagccgtcgttacccccgcctacgtcagcgccaagtgcatctgcgtccacctcgtcccaactgccctccgcatcaggcagcgcgtcaaatcctcccagcgcctcccgcacgccagaacatcctcctatcgtgctacgcatctccaagggcacttcgcggttggtcagcacggatagcgaggagccgccgagcagctcgcccgctcaccagaaccaactgaatcaactttcggtcacggaggaggagccagcggagcggtccggagacgaaacagttcctgcaagtacgccaaaaatcacagtgaagccactgaggccgcccacagcagcagattccgtcgatggatcatctgcggcagttggaggagcatcagcaggcgattctttcgaggaacgcaagtcccagtcactagaacccaacgaggacgaggaggaggaagaagaggaggaggacgaggaggaggaaccgccggagatcaactactgcacggtaaagatatccccggacaaaccgccgaaggagcggctcaaactgatcatcaagacggacgtgatccgcaacgccatcgccaaagccgcagcagcagccgagtcccgcagtgaaaagaagtcgaggagcaaaaagcacaagcacaagcagctgcttgccgcgggatctggtgccgctccagcttctggagccacccccgccgagatcaactccgaattcaagacaccctcacctcatttggctctcagcgaggccaatagtcaacaagcacagcatacaccatctcatctacatcaactgcaccagctgcatccgcagcgaggctccgcggtcatatcaccaaccactcgatccgatcacgacttcgactcgcagtcctcggtgctgggcagcatctcctcgaagggcaacagcacgccgcaactgttagcgcaggctgtgcaggaggatagttgtgtgattcgcagcaggggatctagtgtgatcaccagtgatctagagacgagtcagcactcctcgctggtggctcccccctcggacattgagtcacgactggagtccatgatgatgaccatcgacggagcgggaacgggagcagcatctgcagtgccggagacaccactgcaggaggacatactggctgtgctgcgaggggaagtgccacggctaaatggcaatacggacccggagccaaccgaggaggaggatcaacagcaacagccgaagagggccacgcgtggcaggggcagaaaggccaataacaatgtggatgtaaccccacccgccacggagaccagaacccgaggtagggccaaaggagcagatgcgaccacggctgccatatcgccaccaacgggcaaaagaaacacgcggggcacccggggctccagaaaggccgagcaggaagtcgacatggaagtggacgaaacggcgatgacgacggtgccagcgaacgaggaacagctggaacaggccacacttccaccgaggagaggtcgcaatgctgctgcccgagccaataacaataatttggcaagcgttaacaataacattaataaaatagccgccaatttgtcagccaaggccgaggccagccgactagcagaaggcggagtcgcgggtggagcggcacgaagctatggtcggaaacgaaagaaccagcaggtaacgcaggtgctacagcaggagccagtgcccgaagagcaggaaactcctgatgctgaggaggagcagcccacacccgccaagattccgcacacagatcacagggaacattcgccagaccatgatccggatcctgatccggatgaactgtcgaacaactcaaacaactcctcgttgcagcacgatgggtcctcctcctcgcccccaccccgcgatttcaagtttaaggataagtttaagcgaacattgacactggacacacagggcgcggcgaacgccggagcgggaggagcagcagcggcggcgccacctgagtcctctggcgaacagcggggcgctgtcaagctggtcatctcaaagaagaaaggcagcatcttcaaaagccgcgctctggtgccatccgatcaagcggaacaggctacagtggccaagcgacatctgtacaagcacagttgggatgctgcgctagaagcgaatggcggtggaaccaacagcgatgccagcaatgcctcggcatctggcgtgggcgtcgctggggcgaaggatcatctgcatcatttagcggcgggcaagtccgatggtgatttcggtgacagtccgtcgtcgaacaacaatggctcctccagtgcgtgcagcagcgcatccacgttgcgcggcgatagcccggccctcggaaagatctcgcgactggcgggaaaacagggagtacctgccacctccactagttccgatgcctttgacctggatttggaaccaattgccggagagcttgacctagagcgtagtgcagctggtgcttccgctggtggaacaggggcaacgacaggcggaggtggagcgacgggcggtggcggccccgttcgggtcgaccgcaaaactaaggactactatccagtggtgcgtaacgttaagacggcccatcaaattcaggagatcggcgagtaccaggaaatggacgacgacgtcgagtacatcctggacgcacttcagccgcacaatcccccggcaacacggtgtctctccgcccttcagctagccgccaagtgtatgatgcccgccttccggatgcacgtgcgtgcccatggggtggtcaccaaatttttcaaggcattatccgacgccaacaaggacctcagcctaggcctgtgcacctcggccatcatgtacattctttcccaggagggcctcaacatggacctggatcgcgactccttggagctgatgatcaaccttctggaggcggacggcgtgggtggcagcacggagactgggcacccggatagagcgggctacgaccgcaacaagcagaaggtgcgcgagttgtgcgaggagatcaaggcgcagggcaagggaacgcatctcaacgttgattctctgactgtgggcacgctggcaatggaaacgctgctatcgctaacatccaagcgcgcgggcgagtggtttaaagaggatctgcgcaagctgggtggcctggagcacattatcaagaccatctcggacttctgcagaccggtgattgcctgcgacacggagattgactggcagccgacgctgctggataacatgcaaacggtggcgcgttgtctgcgagtcctcgaaaacgtgacgcagcacaatgagacgaaccagcgctacatgctcacctctggccagggaaaagcagtggagacgctttgccaactgtaccgtctttgcagccgacaaataatgctgcatccttcggatggtggtggcagcaacaaggagcatccgggtgtggctatgcgcgagctgctggtgccggtgctcaaggtactgatcaacctgacgcacacgttcaacgaggcgcagccatcgttgggagccgagctgctaggtcaaaggggcgatgtggtggagacgagcttccgattgctgctgctctcggccaactacattcccgaccaatgtgtctttgagctaagcatactggttcttacactgctaatcaatttgtgcatgcatactgtgcccaaccgggctgctctaatgcaagctgccgctccggcagagtacgtagcggataatccaccagcgcagggatctgtgagtgcactgcaagctctgcttgagtacttctacaagtgcgaggagctggctagattggtggaaaagaacacggacgccttcctcgagagcaacgagaagggaaagaagaaacaagaagaagtggaggagacagtcaacaatcttgtgcaacgagccggccaccacatggagcacacgctaaagggaagttatgcggccatcctggtgggaaatctgatagcggacaacgagttgtacgagtcggtggtgcgccgccagctgcgaggaaatagctttaaggagattattggagtgctggagaagtaccacacattcatgaaccttacatccagcttggaggcagcctttgtggcgcatatgaagtccacgaagcgcatcatcgacaactttaagaagcgcgactacatctacgagcactcggatgagcacgacaaccccctgcctctgaatctggaaacgacggcgcaagtcttggccgtgggagcggacgcgtcgcatgctgctacaagctcgaccacggtcggctctggctccgcaccctcatccacatcggccacaggaacgacgagggcgccgcgggtctataaaacgtacagcagccacaggtaatcggacctgggatctgaatcggaatcgaagagccatcgcaattgtcgttaaccacaccgaaagcctgccaccaaaataaaattctgttgtttgtgattatgtaatttgtttatgtgttgatataacaatcactacatgtatgtgtatagcctgtaatgcacctagtttcagtcagctatatatatatagatatatatatatatagaagtatatagctaagagcgataggatacaatgcgatctgtttttgcgtttgtattaacccaaagtgatagcgaattcctgagcatggtctgcgttttaactaaagaaaatgattaagattgacgaaacgaaagcgacaccccgaacaacacaaagatccaaatccccactaatatgagtacgttatatagtcataagcaatattagcagctaaatgtcggcttaccctcgaaagcacacacccatgtaaatattctttaatcagcgattttatcggacgcgtcttaggtttatttcgaatgtgttttttttttacctattcatactttatatattaaaccttttttttattgattgtaaaacaagcgctcttagcaaaaacgctgcagcagaaagagcgagagcgatagacatgtgtaaagagagagttagagaggaaaattctagattagatgtgggaaataaagttattttattgcctaaacgtaagctaaagaaactctacttataaaactaacactgataaataaatatatatatgtatatgga

SEQ ID NO: 110 - DNA, 5093 bp, Drosophila melanogaster
gaattggagtcgagtcgctctcccgagttgttggtgttttgttttttgttccgcatttatctgtcggttcttgcccatttcggttcacttggagtgctaattaccgggaacgcgacatagttgtgcttattttcatttgccagatcagctagccaaaaggcacttcgcggttggtcagcacggatagcgaggagccgccgagcagctcgcccgctcaccagaaccaactgaatcaactttcggtcacggaggaggagccagcggagcggtccggagacgaaacagttcctgcaagtacgccaaaaatcacagtgaagccactgaggccgcccacagcagcagattccgtcgatggatcatctgcggcagttggaggagcatcagcaggcgattctttcgaggaacgcaagtcccagtcactagaacccaacgaggacgaggaggaggaagaagaggaggaggacgaggaggaggaaccgccggagatcaactactgcacggtaaagatatccccggacaaaccgccgaaggagcggctcaaactgatcatcaagacggacgtgatccgcaacgccatcgccaaagccgcagcagcagccgagtcccgcagtgaaaagaagtcgaggagcaaaaagcacaagcacaagcagctgcttgccgcgggatctggtgccgctccagcttctggagccacccccgccgagatcaactccgaattcaagacaccctcacctcatttggctctcagcgaggccaatagtcaacaagcacagcatacaccatctcatctacatcaactgcaccagctgcatccgcagcgaggctccgcggtcatatcaccaaccactcgatccgatcacgacttcgactcgcagtcctcggtgctgggcagcatctcctcgaagggcaacagcacgccgcaactgttagcgcaggctgtgcaggaggatagttgtgtgattcgcagcaggggatctagtgtgatcaccagtgatctagagacgagtcagcactcctcgctggtggctcccccctcggacattgagtcacgactggagtccatgatgatgaccatcgacggagcgggaacgggagcagcatctgcagtgccggagacaccactgcaggaggacatactggctgtgctgcgaggggaagtgccacggctaaatggcaatacggacccggagccaaccgaggaggaggatcaacagcaacagccgaagagggccacgcgtggcaggggcagaaaggccaataacaatgtggatgtaaccccacccgccacggagaccagaacccgaggtagggccaaaggagcagatgcgaccacggctgccatatcgccaccaacgggcaaaagaaacacgcggggcacccggggctccagaaaggccgagcaggaagtcgacatggaagtggacgaaacggcgatgacgacggtgccagcgaacgaggaacagctggaacaggccacacttccaccgaggagaggtcgcaatgctgctgcccgagccaataacaataatttggcaagcgttaacaataacattaataaaatagccgccaatttgtcagccaaggccgaggccagccgactagcagaaggcggagtcgcgggtggagcggcacgaagctatggtcggaaacgaaagaaccagcaggtaacgcaggtgctacagcaggagccagtgcccgaagagcaggaaactcctgatgctgaggaggagcagcccacacccgccaagattccgcacacagatcacagggaacattcgccagaccatgatccggatcctgatccggatgaactgtcgaacaactcaaacaactcctcgttgcagcacgatgggtcctcctcctcgcccccaccccgcgatttcaagtttaaggataagtttaagcgaacattgacactggacacacagggcgcggcgaacgccggagcgggaggagcagcagcggcggcgccacctgagtcctctggcgaacagcggggcgctgtcaagctggtcatctcaaagaagaaaggcagcatcttcaaaagccgcgctctggtgccatccgatcaagcggaacaggctacagtggccaagcgacatctgtacaagcacagttgggatgctgcgctagaagcgaatggcggtggaaccaacagcgatgccagcaatgcctcggcatctggcgtgggcgtcgctggggcgaaggatcatctgcatcatttagcggcgggcaagtccgatggtgatttcggtgacagtccgtcgtcgaacaacaatggctcctccagtgcgtgcagcagcgcatccacgttgcgcggcgatagcccggccctcggaaagatctcgcgactggcgggaaaacagggagtacctgccacctccactagttccgatgcctttgacctggatttggaaccaattgccggagagcttgacctagagcgtagtgcagctggtgcttccgctggtggaacaggggcaacgacaggcggaggtggagcgacgggcggtggcggccccgttcgggtcgaccgcaaaactaaggactactatccagtggtgcgtaacgttaagacggcccatcaaattcaggagatcggcgagtaccaggaaatggacgacgacgtcgagtacatcctggacgcacttcagccgcacaatcccccggcaacacggtgtctctccgcccttcagctagccgccaagtgtatgatgcccgccttccggatgcacgtgcgtgcccatggggtggtcaccaaatttttcaaggcattatccgacgccaacaaggacctcagcctaggcctgtgcacctcggccatcatgtacattctttcccaggagggcctcaacatggacctggatcgcgactccttggagctgatgatcaaccttctggaggcggacggcgtgggtggcagcacggagactgggcacccggatagagcgggctacgaccgcaacaagcagaaggtgcgcgagttgtgcgaggagatcaaggcgcagggcaagggaacgcatctcaacgttgattctctgactgtgggcacgctggcaatggaaacgctgctatcgctaacatccaagcgcgcgggcgagtggtttaaagaggatctgcgcaagctgggtggcctggagcacattatcaagaccatctcggacttctgcagaccggtgattgcctgcgacacggagattgactggcagccgacgctgctggataacatgcaaacggtggcgcgttgtctgcgagtcctcgaaaacgtgacgcagcacaatgagacgaaccagcgctacatgctcacctctggccagggaaaagcagtggagacgctttgccaactgtaccgtctttgcagccgacaaataatgctgcatccttcggatggtggtggcagcaacaaggagcatccgggtgtggctatgcgcgagctgctggtgccggtgctcaaggtactgatcaacctgacgcacacgttcaacgaggcgcagccatcgttgggagccgagctgctaggtcaaaggggcgatgtggtggagacgagcttccgattgctgctgctctcggccaactacattcccgaccaatgtgtctttgagctaagcatactggttcttacactgctaatcaatttgtgcatgcatactgtgcccaaccgggctgctctaatgcaagctgccgctccggcagagtacgtagcggataatccaccagcgcagggatctgtgagtgcactgcaagctctgcttgagtacttctacaagtgcgaggagctggctagattggtggaaaagaacacggacgccttcctcgagagcaacgagaagggaaagaagaaacaagaagaagtggaggagacagtcaacaatcttgtgcaacgagccggccaccacatggagcacacgctaaagggaagttatgcggccatcctggtgggaaatctgatagcggacaacgagttgtacgagtcggtggtgcgccgccagctgcgaggaaatagctttaaggagattattggagtgctggagaagtaccacacattcatgaaccttacatccagcttggaggcagcctttgtggcgcatatgaagtccacgaagcgcatcatcgacaactttaagaagcgcgactacatctacgagcactcggatgagcacgacaaccccctgcctctgaatctggaaacgacggcgcaagtcttggccgtgggagcggacgcgtcgcatgctgctacaagctcgaccacggtcggctctggctccgcaccctcatccacatcggccacaggaacgacgagggcgccgcgggtctataaaacgtacagcagccacaggtaatcggacctgggatctgaatcggaatcgaagagccatcgcaattgtcgttaaccacaccgaaagcctgccaccaaaataaaattctgttgtttgtgattatgtaatttgtttatgtgttgatataacaatcactacatgtatgtgtatagcctgtaatgcacctagtttcagtcagctatatatatatagatatatatatatatagaagtatatagctaagagcgataggatacaatgcgatctgtttttgcgtttgtattaacccaaagtgatagcgaattcctgagcatggtctgcgttttaactaaagaaaatgattaagattgacgaaacgaaagcgacaccccgaacaacacaaagatccaaatccccactaatatgagtacgttatatagtcataagcaatattagcagctaaatgtcggcttaccctcgaaagcacacacccatgtaaatattctttaatcagcgattttatcggacgcgtcttaggtttatttcgaatgtgttttttttttacctattcatactttatatattaaaccttttttttattgattgtaaaacaagcgctcttagcaaaaacgctgcagcagaaagagcgagagcgatagacatgtgtaaagagagagttagagaggaaaattctagattagatgtgggaaataaagttattttattgcctaaacgtaagctaaagaaactctacttataaaactaacactgataaataaatatatatatgtatatgga

SEQ ID NO: 111 - protein, 1741 aa, Drosophila melanogaster
MSRWGKNIVVPLDSLCKEKENTNRPTVARSVGTVGKWGKMGFTSTRTYTLPAIHPMAAAAAAAAAAASPSQSPASTQDHDPNDLSVSVPEPPKPKKFFKSRNTAPPEVIAQIIQQLPHCGAGASPMRDHFSSAGAGAGGLTPTSGAQEAGGVKLKPGKGASSAERKRKSPKKKAATTSASTPSTPGAFYGASDRDGDGLSDPASEQPEQPSSASGKQKQKKPKEEKKLKPEAPPSRVLGRARKAVNYREVDEDERYPTPTKDLIIPKAGRQPAEVAATATLAAASSEAFISSTFGSPGSEPSLPPPTSAPSASASTSSQLPSASGSASNPPSASRTPEHPPIVLRISKGTSRLVSTDSEEPPSSSPAHQNQLNQLSVTEEEPAERSGDETVPASTPKITVKPLRPPTAADSVDGSSAAVGGASAGDSFEERKSQSLEPNEDEEEEEEEEDEEEEPPEINYCTVKISPDKPPKERLKLIIKTDVIRNAIAKAAAAAESRSEKKSRSKKHKHKQLLAAGSGAAPASGATPAEINSEFKTPSPHLALSEANSQQAQHTPSHLHQLHQLHPQRGSAVISPTTRSDHDFDSQSSVLGSISSKGNSTPQLLAQAVQEDSCVIRSRGSSVITSDLETSQHSSLVAPPSDIESRLESMMMTIDGAGTGAASAVPETPLQEDILAVLRGEVPRLNGNTDPEPTEEEDQQQQPKRATRGRGRKANNNVDVTPPATETRTRGRAKGADATTAAISPPTGKRNTRGTRGSRKAEQEVDMEVDETAMTTVPANEEQLEQATLPPRRGRNAAARANNNNLASVNNNINKIAANLSAKAEASRLAEGGVAGGAARSYGRKRKNQQVTQVLQQEPVPEEQETPDAEEEQPTPAKIPHTDHREHSPDHDPDPDPDELSNNSNNSSLQHDGSSSSPPPRDFKFKDKFKRTLTLDTQGAANAGAGGAAAAAPPESSGEQRGAVKLVISKKKGSIFKSRALVPSDQAEQATVAKRHLYKHSWDAALEANGGGTNSDASNASASGVGVAGAKDHLHHLAAGKSDGDFGDSPSSNNNGSSSACSSASTLRGDSPALGKISRLAGKQGVPATSTSSDAFDLDLEPIAGELDLERSAAGASAGGTGATTGGGGATGGGGPVRVDRKTKDYYPVVRNVKTAHQIQEIGEYQEMDDDVEYILDALQPHNPPATRCLSALQLAAKCMMPAFRMHVRAHGVVTKFFKALSDANKDLSLGLCTSAIMYILSQEGLNMDLDRDSLELMINLLEADGVGGSTETGHPDRAGYDRNKQKVRELCEEIKAQGKGTHLNVDSLTVGTLAMETLLSLTSKRAGEWFKEDLRKLGGLEHIIKTISDFCRPVIACDTEIDWQPTLLDNMQTVARCLRVLENVTQHNETNQRYMLTSGQGKAVETLCQLYRLCSRQIMLHPSDGGGSNKEHPGVAMRELLVPVLKVLINLTHTFNEAQPSLGAELLGQRGDVVETSFRLLLLSANYIPDQCVFELSILVLTLLINLCMHTVPNRAALMQAAAPAEYVADNPPAQGSVSALQALLEYFYKCEELARLVEKNTDAFLESNEKGKKKQEEVEETVNNLVQRAGHHMEHTLKGSYAAILVGNLIADNELYESVVRRQLRGNSFKEIIGVLEKYHTFMNLTSSLEAAFVAHMKSTKRIIDNFKKRDYIYEHSDEHDNPLPLNLETTAQVLAVGADASHAATSSTTVGSGSAPSSTSATGTTRAPRVYKTYSSHR

SEQ ID NO: 112 - protein, 1090 aa, Drosophila melanogaster
MTIDGAGTGAASAVPETPLQEDILAVLRGEVPRLNGNTDPEPTEEEDQQQQPKRATRGRGRKANNNVDVTPPATETRTRGRAKGADATTAAISPPTGKRNTRGTRGSRKAEQEVDMEVDETAMTTVPANEEQLEQATLPPRRGRNAAARANNNNLASVNNNINKIAANLSAKAEASRLAEGGVAGGAARSYGRKRKNQQVTQVLQQEPVPEEQETPDAEEEQPTPAKIPHTDHREHSPDHDPDPDPDELSNNSNNSSLQHDGSSSSPPPRDFKFKDKFKRTLTLDTQGAANAGAGGAAAAAPPESSGEQRGAVKLVISKKKGSIFKSRALVPSDQAEQATVAKRHLYKHSWDAALEANGGGTNSDASNASASGVGVAGAKDHLHHLAAGKSDGDFGDSPSSNNNGSSSACSSASTLRGDSPALGKISRLAGKQGVPATSTSSDAFDLDLEPIAGELDLERSAAGASAGGTGATTGGGGATGGGGPVRVDRKTKDYYPVVRNVKTAHQIQEIGEYQEMDDDVEYILDALQPHNPPATRCLSALQLAAKCMMPAFRMHVRAHGVVTKFFKALSDANKDLSLGLCTSAIMYILSQEGLNMDLDRDSLELMINLLEADGVGGSTETGHPDRAGYDRNKQKVRELCEEIKAQGKGTHLNVDSLTVGTLAMETLLSLTSKRAGEWFKEDLRKLGGLEHIIKTISDFCRPVIACDTEIDWQPTLLDNMQTVARCLRVLENVTQHNETNQRYMLTSGQGKAVETLCQLYRLCSRQIMLHPSDGGGSNKEHPGVAMRELLVPVLKVLINLTHTFNEAQPSLGAELLGQRGDVVETSFRLLLLSANYIPDQCVFELSILVLTLLINLCMHTVPNRAALMQAAAPAEYVADNPPAQGSVSALQALLEYFYKCEELARLVEKNTDAFLESNEKGKKKQEEVEETVNNLVQRAGHHMEHTLKGSYAAILVGNLIADNELYESVVRRQLRGNSFKEIIGVLEKYHTFMNLTSSLEAAFVAHMKSTKRIIDNFKKRDYIYEHSDEHDNPLPLNLETTAQVLAVGADASHAATSSTTVGSGSAPSSTSATGTTRAPRVYKTYSSHR

SEQ ID NO: 113 - DNA, 2320 bp, Drosophila melanogaster
tatattttagcagcgtttgcggaattttttgcatttcagttactccaagtgtgaataagagcacggtcgctgttatagtgtcttgcaaagcagtgaattaaaaaagtttaataatccaaatcgagaatcccaaatttgtgtagacgtagcaacaacagtaaaacgcgctggccggaaaagacgctgctggtagtgattcccaatcagctttgtttacaaggtccactccaattcctacgcactcgagttgtggcgagagttttttatgcgacatcaactgaagctggagctgccgaaagatatgcacgaggtggcgaaagctgagctagaatcgggcggcagatgacaaggacaacgccacgcacatggcggcaaggctacaacaaggatacaggatacggccaaccggatattaaaccatcaacactagccagcacagcaaagcaaaattaaggaacaactgcaatcccggtacaccagtacaccatggctgcaacgctgacggaagcgggaacaggtcctgcggccaccagggagttcgtcgagggatggactttggcccaaactctgggcgaaggtgcctacggcgaggtaaagctactaatcaaccggcagactggcgaggctgtggccatgaaaatggtggatctaaaaaaacatccggatgcagcgaactcggtgcgaaaggaggtatgcatacagaagatgctccaggataagcatatcctccgatttttcggcaaacgttcgcaaggcagtgtggagtacatattcctggaatacgccgccggcggagagctattcgatcgaataggtgaggaaccagacgtgggaatgccgcagcatgaggctcaaaggtattttacacagctcctgtccggactcaattacctgcatcagcgtgggatcgctcatcgggatctgaagccggaaaatctgctgcttgacgagcatgacaacgtgaaaatatcggactttggcatggctactatgtttaggtgcaagggcaaggagcgactgctggacaaacgctgcggcaccttgccgtatgtggcgcccgaggtgctacagaaggcatatcacgcccagccggcggatctctggtcgtgtggcgttatattggtgacaatgctggcgggtgagctgccctgggatcagccgtccaccaattgcacggagttcaccaactggagggataacgatcactggcaactgcagactccttggagcaaactggacaccttggctatttcgctgcttcgcaagctgctggccaccagtcctggcacgcgtttgaccctggagaaaaccctggatcacaaatggtgcaacatgcagtttgcagacaatgaacgttcctatgacctggtggactcggcggctgccctggagatatgctcgccaaaggctaagaggcagcgtctgcagtctagtgcccacttgagcaatggcctggatgactccatctcccggaactactgctctcaacccatgcccacaatgcgcagcgacgatgacttcaatgtcagactgggcagtggccgatccaaggaggatggaggcgaccgccagacgttggcccaggaggctcggctcagttactccttctcgcaaccagctttgcttgatgatctcctactggctacccagatgaaccaaacgcagaacgcttcccagaactatttccagcgtttggtgaggagaatgacccgattctttgtgaccacacgatgggatgacactatcaagcgattggtgggaaccatcgaaagactgggtggttatacgtgcaaatttggtgacgacggagtggtcaccgtatccacagtcgatcggaataagctgcgattggttttcaaggcacacattatagagatggatggcaagattcttgttgactgccggctgtcaaagggttgcggcttggagtttaaacgacgatttatcaagatcaaaaacgccctggaggatatcgtgcttaaaggacccaccacctggccgattgcgattgctacaaattcggtgccttagcttttagtttcattcgaacttaaaatcctgtcttgtcttgtattcggttatatttacatttgtctagcctgtaagagcaactcatgcatcaccttcgatcagaatcatctaaaattctcaatgtgctaacttatttttaattcattgcattgtttacgagtacgttgtgtattgctaagcgggctctcattcgattttaattttgttgaattttaaagcaaaagtcgagtattgaaaactagtttaaatgttatcgaacaataaatcttatgcgattttgagtagaaaa

SEQ ID NO: 114 - DNA, 2786 bp, Drosophila melanogaster
gtcccactgtgcactgctgaacttgagcgagagagcaagttgaacttgccaaatgctgtgcggaagaggaagagcgagaggatttctccaaccccttcccgcctatcgtttttggcgcgcgcaagcgtaagctctccctgctctcgcggcctctccgacgctctctggaagtttcgagtttctttcgaggctttctcggttcggcgaacctaggcggcagtttgatttcaactctcagacaggacgaagcgcctgccacaggatatggctgggaaactatagtggaaacctacgccgctatgtaatagtaaattaatagtagttctctactactgcagtagtaggcggcgcttttcaatcgtattgaaaggaatacaatgacgggggcaagagagaaacgaacggagaaagagtgcacggaccacgaggctgtttcattaaaattgggatacagacaaaacgtggctcgcaggataccggatacgtctgtgtgcgtgtgtgtgccgcatccattcaggaggctaagaaaaaggacggcacacagttttcagtggtgactttctcggcaaaatcctaaaaaaggacaaaacggttcggttcctatttggtttctcgactttcggtcttcggggtagttccttagtctctcagaatagcaagatgataaacctgaaaaagaagaagaagccgtccaagaagcagcttcgcaaaaattccgcgctttggctctcaatcgccaacaattcgtcggaaatcaagaaaaatatatgcacgaggtggcgaaagctgagctagaatcgggcggcagatgacaaggacaacgccacgcacatggcggcaaggctacaacaaggatacaggatacggccaaccggatattaaaccatcaacactagccagcacagcaaagcaaaattaaggaacaactgcaatcccggtacaccagtacaccatggctgcaacgctgacggaagcgggaacaggtcctgcggccaccagggagttcgtcgagggatggactttggcccaaactctgggcgaaggtgcctacggcgaggtaaagctactaatcaaccggcagactggcgaggctgtggccatgaaaatggtggatctaaaaaaacatccggatgcagcgaactcggtgcgaaaggaggtatgcatacagaagatgctccaggataagcatatcctccgatttttcggcaaacgttcgcaaggcagtgtggagtacatattcctggaatacgccgccggcggagagctattcgatcgaataggtgaagaaccagacgtgggaatgccgcagcatgaggctcaaaggtattttacacagctcctgtccggactcaattacctgcatcagcgtgggatcgctcatcgggatctgaagccggaaaatctgctgcttgacgagcatgacaacgtgaaaatatcggactttggcatggctactatgtttaggtgcaagggcaaggagcgactgctggacaaacgctgcggcaccttgccgtatgtggcgcccgaggtgctacagaaggcatatcacgcccagccggcggatctctggtcgtgtggcgttatattggtgacaatgctggcgggtgagctgccctgggatcagccgtccaccaattgcacggagttcaccaactggagggataacgatcactggcaactgcagactccttggagcaaactggacaccttggctatttcgctgcttcgcaagctgctggccaccagtcctggcacgcgtttgaccctggagaaaaccctggatcacaaatggtgcaacatgcagtttgcagacaatgaacgttcctatgacctggtggactcggcggctgccctggagatatgctcgccaaaggctaagaggcagcgtctgcagtctagtgcccacttgagcaatggcctggatgactccatctcccggaactactgctctcaacccatgcccacaatgcgcagcgacgatgacttcaatgtcagactgggcagtggccgatccaaggaggatggaggcgaccgccagacgttggcccaggaggctcggctcagttactccttctcgcaaccagctttgcttgatgatctcctactggctacccagatgaaccaaacgcagaacgcttcccagaactatttccagcgtttggtgaggagaatgacccgattctttgtgaccacacgatgggatgacactatcaagcgattggtgggaaccatcgaaagactgggtggttatacgtgcaaatttggtgacgacggagtggtcaccgtatccacagtcgatcggaataagctgcgattggttttcaaggcacacattatagagatggatggcaagattcttgttgactgccggctgtcaaagggttgcggcttggagtttaaacgacgatttatcaagatcaaaaacgccctggaggatatcgtgcttaaaggacccaccacctggccgattgcgattgctacaaattcggtgccttagcttttagtttcattcgaacttaaaatcctgtcttgtcttgtattcggttatatttacatttgtctagcctgtaagagcaactcatgcatcaccttcgatcagaatcatctaaaattctcaatgtgctaacttatttttaattcattgcattgtttacgagtacgttgtgtattgctaagcgggctctcattcgattttaattttgttgaattttaaagcaaaagtcgagtattgaaaactagtttaaatgttatcgaacaataaatcttatgcgattttgagtagaaaa

SEQ ID NO: 115 - protein, 514 aa, Drosophila melanogaster
MAATLTEAGTGPAATREFVEGWTLAQTLGEGAYGEVKLLINRQTGEAVAMKMVDLKKHPDAANSVRKEVCIQKMLQDKHILRFFGKRSQGSVEYIFLEYAAGGELFDRIGEEPDVGMPQHEAQRYFTQLLSGLNYLHQRGIAHRDLKPENLLLDEHDNVKISDFGMATMFRCKGKERLLDKRCGTLPYVAPEVLQKAYHAQPADLWSCGVILVTMLAGELPWDQPSTNCTEFTNWRDNDHWQLQTPWSKLDTLAISLLRKLLATSPGTRLTLEKTLDHKWCNMQFADNERSYDLVDSAAALEICSPKAKRQRLQSSAHLSNGLDDSISRNYCSQPMPTMRSDDDFNVRLGSGRSKEDGGDRQTLAQEARLSYSFSQPALLDDLLLATQMNQTQNASQNYFQRLVRRMTRFFVTTRWDDTIKRLVGTIERLGGYTCKFGDDGVVTVSTVDRNKLRLVFKAHIIEMDGKILVDCRLSKGCGLEFKRRFIKIKNALEDIVLKGPTTWPIAIATNSVP

SEQ ID NO: 116 - protein, 514 aa, Drosophila melanogaster; identical to SEQ ID NO: 115

SEQ ID NO: 117 - DNA, 904 bp, Drosophila melanogaster
ccgtcgtcggtcataaaaacgaaaagcatgtgaacgatactttgtgaagatttgaaaacgactttagcttagttaatatatgcaacaattccgcatccacactcagcagcaatcttagcagaaagacttactcagcagaagagggagtgagttgcagtaaccgtccgtagaaccaaatatcagttgccatctcagaggaggaagagcgcatccacattcgcatccgatccaacccgaaccgatcatggcaaccactccacgcagcggcggtgccagcggcactggaacggcgcagcggcccaatggcacctcgcagaacaaaagctgccaattcaagttggtgctcctcggcgagtccgctgtgggcaagtcctcactggtgctgcgcttcgtcaagggacagttccacgagtaccaggagagcacgataggtgcggcctttctgacacagactatttgcatagaggacactgtcgttaagttcgagatctgggacacggctggccaggagcggtaccacagcttagctcccatgtattatcgaggagcgcaggccgctattgtcgtctatgatatacagaatcaggacagttttcagcgtgcgaagacctgggtcaaggaactgcataaacaagcctcaccaaacattgtcattgcgctggccggcaacaaggcagatttgtcaaacattcgcgtcgtagagttcgatgaagcgaagcaatatgccgaggagaacgggctgctgttcatggaaacctccgccaagacgggcatgaatgtgaacgacatcttcttggccattgccaagaaactacctaagaacgatggcgccaacaatcagggaaccagcataaggccgactggaaccgaaacaaatcgaccgacgaacaactgctgcaagtga

SEQ ID NO: 118 - protein, 219 aa, Drosophila melanogaster
MATTPRSGGASGTGTAQRPNGTSQNKSCQFKLVLLGESAVGKSSLVLRFVKGQFHEYQESTIGAAFLTQTICIEDTVVKFEIWDTAGQERYHSLAPMYYRGAQAAIVVYDIQNQDSFQRAKTWVKELHKQASPNIVIALAGNKADLSNIRVVEFDEAKQYAEENGLLFMETSAKTGMNVNDIFLAIAKKLPKNDGANNQGTSIRPTGTETNRPTNNCCK

SEQ ID NO: 119 - DNA, 1462 bp, Drosophila melanogaster
atgatcttaaaggaggagcacccacaccagagcatcgaaactgccgcaaatgcggcaaggcaggcgcaggtccgctggcgaatggcgcatcttaaggcactcagccgcactcgaacaccagcgcacggcaattgctgcggtcgcgtcgtcagtaaaaatcactttttcaagcacagtcgcgcgtttctgtggttcctgctgtgcaacttagtgatgaacgcggacgcattcgcccactcccagctgctcattaacgtccaaaatcagggcggcgaggtgatccaggagagtattacctccaacattggcgaggacctgataacgctggagtttcagaagaccgacggaacgctcatcacccaggtcatcgactttcgcaatgaggttcaaatcctcaaggctctggttctcggcgaggaggagcgtggccagagccagtaccaggtcatgtgcttcgcaaccaagttcaacaagggcgacttcatctcctcggcggcaatggccaagctgcgccagaagaatccgcacaccatccgcactcccgaggaggacaagggccgtgagaccttcaccatgagcagctgggtacagctcaaccgctcgctgcccatcaccagacatctgcagggactctgcgccgaggccatggacgccacctatgtccgggatgtggaccttaaagcttgggcggagctaccaggctcctcgatttccagcctggaggccgccaccgaaaagttcccggacacgctctcgacgcgctgcaacgaggtgagcagcctgtgggcgccctgcctgtgcaacctggagacctgcatcggctggtatccctgcgggctcaagtactgcaagggcaagggagtcgccggagcggactcgtcgggcgcccagcagcaggcacagccgacgaattatcgctgcggcatcaagacctgccgcaagtgcacacagttcacctattatgtgcggcagaaacaacagtgcctctgggatgaatgacgacgcggcgagctgcagctgatgcagatgcgctgcgcgaggcggcggaatggtagcgagtttggggatgatgccagtgccacctgcccgggtggcgaaacaagagcagcaaccacgaccgcgacaataactggcgggggagctgggggaagtgggaaggatacaacggcagcgacaacaacgacaaccaacaaattacgccaactgcttttgttggtccagcagcagatgccttttgctctgtggagttttccggtccatcacatttcccagtcccatcaccagtcccagtcccaacataagcccagccggcagcagaagcagcatcagcatcattctcaggttgcccccacttcgcatcaccagtcatcatcatcaacaccaccaacaccgtcaacatcatcatcaccgccatcatcatcatcgtcgtcgtcgtcgtccgcaatggccgccatcgttgcgt

SEQ ID NO: 120 - protein, 332 aa, Drosophila melanogaster
MILKEEHPHQSIETAANAARQAQVRWRMAHLKALSRTRTPAHGNCCGRVVSKNHFFKHSRAFLWFLLCNLVMNADAFAHSQLLINVQNQGGEVIQESITSNIGEDLITLEFQKTDGTLITQVIDFRNEVQILKALVLGEEERGQSQYQVMCFATKFNKGDFISSAAMAKLRQKNPHTIRTPEEDKGRETFTMSSWVQLNRSLPITRHLQGLCAEAMDATYVRDVDLKAWAELPGSSISSLEAATEKFPDTLSTRCNEVSSLWAPCLCNLETCIGWYPCGLKYCKGKGVAGADSSGAQQQAQPTNYRCGIKTCRKCTQFTYYVRQKQQCLWDE

SEQ ID NO: 121 - DNA, 3820 bp, Drosophila melanogaster
gttcgaaagagtcggttgcctctgtgttttggcggtagtggttgtgcgcacaggtgagagttcggtgcgcaagaggcggttaaagttaaagctgcgcgcgctcaatacaacgaaagaatcggttggccaggtgtatctgtgtacgaatcgttggtaacagccggcaactgagtatcatcatgatgcacaaattgaaatatcgcgataaattaaaatggcttttagcccttcttgtgctgatcggcacttgttttattcagacaaggggacaaacaagagatcccagattttattctcggccaggcgttgactaccattggccaaatccaggcgatccggattacagaacctacacgttcaacgatcgccgatatggtcattatcagccaaatggctatggagccaactatccaggcagaaatccaccgggacaatatccacagggaatgccgaatgaagatcgctttcgatttgacccgaacgatccgaatgcgagaacccagtttccgggagtgctggccggatggcgagaggatttgcagggcaagcagcggcgggattcgttgaccctggagcgggatgttttcgtgaccaccaactatggccaggtgcagggctttaaggtgtacatgtacgataatccagatccgaagtccttctatcgtccctaccactcgaccgtggatcgtgtgatgggcgagtgctcggtcttcctgggcattccctacgccctgccgcccaccttcgagggcaggttcaagccaccacgcgtccatcgaggctggcagctgctgcaggccgtcgactttggacccgcctgtccacagcctgtgcgatatacgggtgccacgaaaggaatcatggacatggacgaggattgcctctacttgaacgtgtattcgccgaagactggtgctggtgtggctcaaaaatacccggttatggtgtacatccatggcggcgagttcattcgtggagcctccaacctattccagggtcatattctggcctcgttctacgacgtggtcgtggtgaccctgaattaccgccttggtgccctgggattcctatcgacgggtgatgagaactcgcccggaaactacggaatcctcgatcaagcgatggcgctacgttgggtctatgacaatattgagttcttcaacggcgatcggaattccatcactctatttggtccgggagcaggaggcgcctccgctggactcctgatggtggcaccacagacgcggaacattgtgcgtcgtgtgatcgcacagtccggatcggctctagcggattgggcgctcatccaggacaagtatcgcgcccagaacacgagtcgcgtgctgggacagctgctgggctgctccattgaatcgtcgtggaagttggtcaactgcctgcgcaccggacgcagcttctatgagctgggaaacgctgagttctctccccaggtgggcagctttccatggggtccagttctggaccacaactttacgttgcccggcgacgattggtacgagggatggcgcgaaaaggattggcgtttcctcacccaaacgccggaaaccctcatccgtgccggtaaattcaaccggaatattcagtacatgacgggcgtgaccacacaggaagcggccttttttgtggcccaaaacgaatccctaagtccgtactatgaactagatggacgtttcttcgatcagaaaataagggaacacgttttccgctacaactatacacttaatccgaacggagtttacgaggccatcaagtacatatacaccttctggccggatcccaataataacaccataatccgggaccagtacataaacatgctgagtgatctctactaccgagcaccggtggatcaaatggtcaagctaatgctggagcagaaggtacccgtttatatgtacgtactgaacaccactgtggaggcactgaatctgccacagtggcgaaagtatccacacgacatcgaacgttatttcctcaccggagctcccttcatggacaccgagttctttcccaaaaaggagcatctgcagcgcaatatgtggacggataacgatcgcaatatgagtcactttttcatgcagacctacacgaattttgctagatatggcaatccgacgccgcaacaggtgctaggcatgcatttccagcgcgcataccagggcgagattcggtacttgaacatcaataccacgtacaactcctccattctactcaactatcggcagacggagtgcgccttctggacgcaatacttgcccacagttattggagtgctggtgcccacttatccacccaccacggagtattggtgggagcccaaggagccactacagatcgccttttggagcatgtcggtggcctgtttcttcctcatagtcctggtggtcatctgctgcatcatgtggcgcaatgccaagcgccaatcggatcgcttctatgacgaagatgtcttcattaatggtgagggcttggaaccggaacaggatacgcgtggagtggacaatgcccacatggtgaccaaccatcatgccctgcgctccagggataatatctacgagtaccgcgactctccatccaccaaaaccttggccagcaaagcgcacacggacaccacctcgttgcgctcacccagttcgctggccatgacccaaaagtccagcagccaggcgtccctcaagtcagggatctcgctcaaggaaaccaatggccatttggtgaagcaatctgaaagggcagccacgccacgatcccaacaaaatgggtccaccgcaaaggtggcgtctcctcctgtggaggagaagcgtctactgcagccactttccagcacgcccgtgacgcagttgcaggcggagccggccaaaagagttcccaccgctgccagtgtctcgggcagcagtcggagcaccactccggtgccctctgcccgcagcaccaccacgcacaccacaacagccaccctgagttcccagccagcggctcagccgaggagaacccacctggtggagggagtgcctcagacatccgttttctcctggaatttttctttaaagtaagttagttattttcgaaaaaagtagtttatgttttgtatttatgataggtttgtaaacagatctttgagatctcagttttgagttgtagtttaggcaaacctgtatttctaatgccttactttaagttaaattgttcgtaagtttgataacccaacgaatacaaatccatatcaatgacattccatagccttatcatcggcctttacgtgtatatatagaatttaaatgtataataagaattatttaaatctaggaaattgcctgccttaactgaaggaaattagctatataatacaagtatttttataacaaatgctgagcttaaatttttaaaactcacttttagtggcagtaatatcgaatgaaattgtaaagagagtatatcttttaaatcaaatattaaaatacaaaaataaattaaccttataaaaaataatgcattacattatttaagacctgctattatttgataacaaactcataacattgtcacgtcccgtattataagaatatcattagaataccattagatcgtagccactcccacacatcatcaagagcaatacacctacagtgccttaataatatttggtaattgtcctcgatggacccacccaccccatccatgatgtaccaactaagtgtgcctttcatacatacataaatgtactcctagttatatactatatatgttctatatgttctgtgtgtcgcatataagcaaaatgaccatacaaaatcagtgt

SEQ ID NO: 122 - protein, 875 aa, Drosophila melanogaster
MPNEDRFRFDPNDPNARTQFPGVLAGWREDLQGKQRRDSLTLERDVFVTTNYGQVQGFKVYMYDNPDPKSFYRPYHSTVDRVMGECSVFLGIPYALPPTFEGRFKPPRVHRGWQLLQAVDFGPACPQPVRYTGATKGIMDMDEDCLYLNVYSPKTGAGVAQKYPVMVYIHGGEFIRGASNLFQGHILASFYDVVVVTLNYRLGALGFLSTGDENSPGNYGILDQAMALRWVYDNIEFFNGDRNSITLFGPGAGGASAGLLMVAPQTRNIVRRVIAQSGSALADWALIQDKYRAQNTSRVLGQLLGCSIESSWKLVNCLRTGRSFYELGNAEFSPQVGSFPWGPVLDHNFTLPGDDWYEGWREKDWRFLTQTPETLIRAGKFNRNIQYMTGVTTQEAAFFVAQNESLSPYYELDGRFFDQKIREHVFRYNYTLNPNGVYEAIKYIYTFWPDPNNNTIIRDQYINMLSDLYYRAPVDQMVKLMLEQKVPVYMYVLNTTVEALNLPQWRKYPHDIERYFLTGAPFMDTEFFPKKEHLQRNMWTDNDRNMSHFFMQTYTNFARYGNPTPQQVLGMHFQRAYQGEIRYLNINTTYNSSILLNYRQTECAFWTQYLPTVIGVLVPTYPPTTEYWWEPKEPLQIAFWSMSVACFFLIVLVVICCIMWRNAKRQSDRFYDEDVFINGEGLEPEQDTRGVDNAHMVTNHHALRSRDNIYEYRDSPSTKTLASKAHTDTTSLRSPSSLAMTQKSSSQASLKSGISLKETNGHLVKQSERAATPRSQQNGSTAKVASPPVEEKRLLQPLSSTPVTQLQAEPAKRVPTAASVSGSSRSTTPVPSARSTTTHTTTATLSSQPAAQPRRTHLVEGVPQTSVFSWNFSLK

SEQ ID NO: 123 - DNA, 4758 bp, Drosophila melanogaster
gactgtgttgcgtcgtgtgatcgctagagcggttgtggaatcggattcgagcgcaaaacaccgttcatgctgtgaaaaatccgatatttgtcgtgcaataatttcctcgattggcatcaagtggcttccagtcgggtacatattgcacaagaaatgttatacgcataatgtgcacgcaaattaaacgaattctctatgaaaatgtgactagaatgtgagtcgaacaaaacgagtaaaacgtgaaatcccaactggcttttgggtaacaaatcttatcaacacagcaacggaaatacattaaaatcttgatagactgagaaagggacaattggaatacttttagttatttttaaatgttttatttttcaagttttacaacacaatggaactgcatcaacgacacctctcaaacttttacaaattgcacaactgagaaatagtctttgataaataaataaaatataagaaatcgctactgaaacaagatgccaaacatgtccagcatcaaagcggagcagcaaagcggtcctcttggaggaagtagcggctatcaagtaccggtcaacatgtgcaccaccacagtcgcgaatacgacgaccactttgggaagctccgccgggggagccactggctcccggcacaacgtctccgtgacaaacatcaagtgcgaactagacgaactaccgtcaccgaacggcaacatggtgccggttatcgcaaactacgttcacggtagcttgcgcattccactcagtggacattcaaatcatagggagtccgattcggaggaggagctggcaagtattgagaacttgaaggttcggcgaaggacggcggcggacaaaaatggtcctcgtccaatgtcctgggagggcgagctgagcgatactgaggtcaacgggggcgaagagctgatggaaatggagccaacaattaagagtgaggtggtccctgctgttgcacccccacaacccgtctgcgcactacaaccgataaaaacagagctagagaacattgcaggcgagatgcagattcaagagaagtgttacccccagtccaacacacaacatcacgctgccacaaaattaaaagtggccccgacgcaaagtgatccgatcaatctcaagttcgaaccgcctctgggagacaattctccgctactggctgcacgtagcaagtccagcagtggaggccacctaccactgccaacgaatcccagtcccgactccgccatacattccgtctacacgcacagctccccctcgcagtcgcctctgacgtcgcgccacgccccctacactccgtctctgagccgcaacaacagcgacgcctcgcacagtagctgctacagctatagctccgaattcagtcccacacactcgcccattcaagcgcgtcatgccccacccgccggcacgctctatggcaaccaccatggtatttaccgccagatgaaggtggaagcctcatccactgtgccgtccagtgggcaggaggcgcagaacctgagtatggactctgcctctagcaatctggatacagtgggcttaggatcttcgcaccccgcatctccggcgggcatatcacgtcagcagttgatcaactcgccctgccccatctgcggtgacaagatcagcggatttcattacgggattttctcctgcgagtcttgcaagggcttcttcaagcgcaccgtgcaaaatcgcaagaactacgtgtgcgtgcgtggtggaccatgtcaggtcagcatttccacgcgcaagaaatgtccagcctgccgcttcgagaagtgtctgcagaagggaatgaaactagaagcgattcgggaggaccgaacccgtggcggccgctccacataccagtgctcctacacgctgcccaactcaatgcttagtccgctgcttagtcctgatcaagcggcagcagctgccgccgcagcagcagtggcaagtcagcagcagccgcaccagcgactacatcaactaaatggatttggaggtgtacccattccctgctctacttctcttccagccagccctagtttggcaggaacttcggtcaagtcggaagagatggcggagacgggcaagcaaagcctccgaacgggaagcgtaccaccactactgcaggaaatcatggatgtagagcatctgtggcagtacaccgatgcagagctggcccgcatcaaccaaccactgtccgcattcgcctctggcagctcttcgtcgtcgtcatcgtcaggtacatcctcaggcgcccatgcacaactcaccaatccactactggctagtgctggtctctcgtccaatggcgagaatgccaatcctgatcttatcgctcatctctgcaacgtggctgatcaccgtctttataaaatcgtcaaatggtgcaagagcttgccgctttttaagaacatttcgatcgatgaccaaatctgcttgctcattaactcgtggtgcgagctgttgctcttctcctgctgttttagatcaattgatactcctggagagattaaaatgtcacaaggcaggaagataaccctatcgcaggccaaatcaaatggcttgcagacttgcattgaacggatgctcaacctaacagatcacctgaggcgattgcgcgttgatcgctacgaatatgttgccatgaaagttattgtgctgttgcagtcagatacgacagagttacaggaagcggtaaaggtgcgcgagtgtcaggaaaaagctttgcagagcttgcaagcttacaccctggcgcattatcctgacacgccatccaagtttggggagcttttgctacgcattcctgatttgcagcgaacgtgccagcttggcaaggagatgttgacgatcaagactcgcgatggagctgatttcaatttgctaatggagcttttgcgcggagagcattgacaattgataactaagacggaaatcttttaccattggcaaaacaagtttcacatatttagtattagatatatatattctatagataagatccttactgtaagttctgaaaacatgtgcctaaaaaccaaagccacgatagcagtcacatcaggcccactggtcgagattaaatccaagagcaagattgccaaatttttacaccaatatatattttgatatgagccatgtgcagggcctcagatcgctgttgttgtcggctaaagtttcagtaagaaaagtatatattgattttgctatttatacatatttgacttatgtatagtgtaaactaaagcacacatggaaaatgaaaagactaaacaaatttatttaaagattacttttactattatagaaaaaggggaaaaataaaaaacacaaaggcagagaagaaaatttagttacaacaggtagcgacatttttatattttcttatataaggaaatattcaatgtattttaaatataaagccaaacccgatttggtttgggaaagagctactgaaatttttgatatctatatattcatcactagaagacgaatgaatgtatccaatgtttaaatgttgtagcgtttagttttagtgcaatttcacacatgtctacatacatgaatattcagcgagatatgtttgcaaactattataaagcaaaagaccactcgaaatcgccatcactgggttggctaagactattccagttatgctgtttgttgcataaaaaaccacaactacgtacatcaataaaatgtataattttttattggagttttagatttgtattaacttcttccttataattacgattattattattattactaattttatgaatattgtgtaacactgacttaaatagctgaaaaaatcctgcaacaggatttaaaacacctgaatacacaaaacattataacatgaatacattttgcttatggcctagatagtttgatatgtactttgcatatgtatgcatgtgtctatatgtgagtacgtaccatacaaattcctgtcccaccagaaaaatcacacgcaataaaaaattccaaaatactaagctcgtatctacaaagaaagattaaaagacaaattgatgaataggaatatgttgccggaagtccaagagatttggctgaaagtatcgacaaattttcaacacatcgttcatggatattgtgctaacactctcagtttgaaaatcattttctgttaaactttctatataataagttctccattcgattttgtatttacaatttgtttctttaattttcctttatcagttgtatctatgaaacatgaggatctcagttcatattgatcgtgttcttctgccgtacaccgcttctgtccgttaatgtaaaccataagtataaatgaaattagttaaatgtttatttataaataaagcgctataataaatttcaatacatttatcatagttaactgattaagaccactgaaatcaaaaatattttatttactaagcaaagcacacgcaaacaatttataatgtttattacgttaacaacaaactcatttttaataattctttatgaatacacaaagttacgcaattttccctctaggcgcattgcttaaatagttaaagaaaaataataaacccatagcgcaatatttaatgtaaaacagttttccttgcgtgtgatgtttgctctagctacgtacaaattcatcatttattaaatttaaaactcaattttgcttttaaataaatttaataagtaaaattcaacaataattgatatacaattgtcaatgcaatattttgtaataaaaatgcgaaaaatc

SEQ ID NO: 124 - protein, 808 aa, Drosophila melanogaster [sequence omitted]

SEQ ID NO: 125 - DNA, 2695 bp, Drosophila melanogaster
aaaacatccttccattggaaggtgctctagtgaaatcggtgatatacttcatccagtgctgcgagcgaactttccgtggaccaaaagtgaaaagaacagctaagccaagcaacaaggattaagcccgaggaaacgcctggaataattgtagcattgtttgccagcgcctttttataaggtgtttgactgtcacggcgccggaaagtcaaggagaattgtttgtgtgtcggcatgcgtgccagttatttgcataaattgcccatctaactcgagttcccttttttgtgcggtgtgaatgagagattggcaaacattcccggacctccaaaaaaagaaagtttcgcgtgaccatttaaattgccctgcaacaatggcaggttcaaacgttttgtggccaatactcctggccgtggtgctgctccaaatatccgtggcattcgtgagtggagcggccagtggtggggtagtccttagcgacgtgaacaacatgttgcgcgatgccaaggtggtgacctcggagaaacccgttgtgcactcaaaacaggaaacggaagcgccggaatccagcgtggagctgctccgcttcgtcgatgatgacgaggatagcgaggacatcagctccattgaacggcaggatggcaggacaatggagagcaaaaaaatggccgatcaggtgcgcctgttgaccaagcagctcaacgccctgatgctgcggcgccgcgaggattacgagatgctggagcacaatctgcgcaaatccctgcggctcaccacgaatgcgaacagcgtggacgccgacatgcgcagcgaactgaaccaactcagggaggagctggccgcgctgcgctcctcgcagagtggcaacaaggagcgcttgaccgtcgagtggctgcagcagacgatctccgagatccgcaaacagctggtggatctgcaaaggacggccagcaacgtggcccaggatgtccagcagcgcagctccacctttgaggatctggccaccattcgcagtgactatcagcagcttaagctagatctggccgctcagcgcgagcgccagcagcagacggaggtctacgtccaggaactgcgcgaggagatgctccagcaggagcaggacttccagcatgccctcgtcaagctgcagcagaggactcgcaaggacggctcatccgccagtgtggaggaggagagcggtagccaggaagccaaccaggagcaaaccggacttgaaaccactgctgatcacaagcgacgccattgccgttttcagagcgaacagatccaccagctgcaactggcccagaggaacctgcgccgacaggtgaacggattgcgcttccaccacatcgacgagcgggttcgcagcatcgaggtggagcagcacaggattgccaatgccaactttaatttgagcagccagatcgcttcgctggacaagctgcatacctcgatgctggagctgctggaagatgtggagggcctccagaccaagatggacaagagcataccggagctgcggcacgagatctccaagctggagttcgccaatgctcagatcacctcggagcagagtctgatcagggaggagggcactaatgcggcacgatccctgcaagccatggctgtaagcgtcagtgtcctgcaggaggagcgcgaaggtatgcggaagctgtccgccaatgtggatcagctgagaaccaatgtggatcgattgcagtcgctggtcaatgatgaaatgaagaataagctcacccacctgaacaagccgcacaagcgaccacatcatcagaatgtccaggcgcagatgccgcaggatgattcgcccattgactccgtcctggccgaaactctggtcagcgagcttgagaacgtggagacccagtacgaggccattatcaacaaactgccgcacgactgcagcgaggtgcacactcaaacagacggactgcatctgattgcgcccgccggccaacggcatccgctgatgacgcactgcaccgccgatggatggacgacggtgcaaaggcggttcgatggcagtgcagacttcaaccgctcgtgggcggattatgcccaaggatttggggcgccaggcggtgaattctggattggcaacgagcagctgcatcacctgaccctggacaactgcagtcggctgcaggtgcaaatgcaggacatctacgacaacgtttgggtggccgagtacaagcgattctacatatcctcgcgagccgatggctatcggctgcacattgccgagtactccggcaacgcttcggatgcactgaactaccaacagggtatgcagttctcggccatcgatgacgatcgggacatctcgcagacgcactgtgctgctaactatgagggtggctggtggttctctcattgccagcacgccaatctcaatgggcgatacaatctgggcctgacttggttcgatgccgctcgcaatgaatggatagcggtcaagtcaagccgaatgctggtcaagcgcctgcccgccgtcgagtgccaggcgaatgccagtgccagtggcgcttttgtttccgtttccggttcggctgctgatgctgcgccgtcgagcggtgcaacaacaacaacaacaacagcaacagcagcgccggcgacggtaacgacgccgaaaaccaacaacagtgtggtccagttcgtggccgccgggcaggcgtaa

SEQ ID NO: 126 - protein, 774 aa, Drosophila melanogaster
MAGSNVLWPILLAVVLLQISVAFVSGAASGGVVLSDVNNMLRDAKVVTSEKPVVHSKQETEAPESSVELLRFVDDDEDSEDISSIERQDGRTMESKKMADQVRLLTKQLNALMLRRREDYEMLEHNLRKSLRLTTNANSVDADMRSELNQLREELAALRSSQSGNKERLTVEWLQQTISEIRKQLVDLQRTASNVAQDVQQRSSTFEDLATIRSDYQQLKLDLAAQRERQQQTEVYVQELREEMLQQEQDFQHALVKLQQRTRKDGSSASVEEESGSQEANQEQTGLETTADHKRRHCRFQSEQIHQLQLAQRNLRRQVNGLRFHHIDERVRSIEVEQHRIANANFNLSSQIASLDKLHTSMLELLEDVEGLQTKMDKSIPELRHEISKLEFANAQITSEQSLIREEGTNAARSLQAMAVSVSVLQEEREGMRKLSANVDQLRTNVDRLQSLVNDEMKNKLTHLNKPHKRPHHQNVQAQMPQDDSPIDSVLAETLVSELENVETQYEAIINKLPHDCSEVHTQTDGLHLIAPAGQRHPLMTHCTADGWTTVQRRFDGSADFNRSWADYAQGFGAPGGEFWIGNEQLHHLTLDNCSRLQVQMQDIYDNVWVAEYKRFYISSRADGYRLHIAEYSGNASDALNYQQGMQFSAIDDDRDISQTHCAANYEGGWWFSHCQHANLNGRYNLGLTWFDAARNEWIAVKSSRMLVKRLPAVECQANASASGAFVSVSGSAADAAPSSGATTTTTTATAAPATVTTPKTNNSVVQFVAAGQA

SEQ ID NO: 127 - DNA, 4333 bp, Drosophila melanogaster
ccagaaacagctgttccagcgcgcttcattttccaaacagaaaaaaagtgtaattgttagcgtcctttgtgaaattgtcaagtgttagaattattgtgtgcgaaagttaactatttgaggacctcccatggaccagtctaaacaggttttgcgggactattgcggcgacggcaatggtacctgtgcatcgtccttgaaggaaatcaccttaattgagaccgtgaccagtttcctggaggagaatggcgccgccgaaatcgacagaagggtcctgcgcaaactagccgaggcactgtccaaaagcatagacgacaccagtccgggagccctgcaagatgtcaccatggagaactcatatgccagttttgacgttccacgacctccaggcggcggcaactcgcccttgccgtcacagggtcgctctgtacgcgaattggaggagcagatgtccgcgctgcgcaaggagaacttcaatctaaagctgcgcatctacttcctcgaggagggtcagccgggtgcccgggcagacagctccacagaatccttaagcaaacagctcatcgatgccaagatcgaaatcgcgacattgagaaaaactgtcgatgtaaagatggagctgctcaaggatgccgctcgagccatttctcatcacgaggaattgcagcgcaaagcagacattgacagccaggcaataatcgacgagttgcaagagcaaatacacgcctatcagatggcggagtctggtggtcaacctgtcgaaaatattgccaaaaccaggaaaatgttgcgccttgaatcggaggtgcagagattggaggaggaactggtgaatatcgaagctcgtaacgttgcagcccggaacgagctggaattcatgttggccgagcgcctagaatccctaacagcctgtgagggcaagattcaagagctggccatcaagaattccgaactggtagagcgtcttgaaaaggaaacagcatccgccgagtcatccaacgccaatcgagatctgggcgcccaactggcggataagatttgcgagctgcaggaagcccaggagaagctcaaggagcgcgagcgcatccacgagcaggcatgccgcaccattcaaaagctaatgcaaaagctaagcagccaggagaaggagataaagaagctcaaccaggagaacgaacagtcggcaaacaaggagaacgactgcgctaagacggtaatttcgccatcctccagcggccgttccatgagtgacaacgaggccagctcccaggaaatgtccaccaacctcagggtgcgctacgaactaaagatcaacgagcaggaggagaagatcaagcagttgcagacggaagtaaagaagaagacggcgaatctgcaaaatctggtcaacaaggagctatgggagaaaaatcgtgaggtggagcgcctcactaagctgctggctaaccaacagaagacgttgccacagataagtgaggaatccgccggagaagcagatctgcagcaatccttcacggaggcggagtacatgagggcattggagcgaaacaagctgctgcagcgaaaggtggatgtgctcttccagcgcctggcagacgatcaacagaacagcgctgtgattgggcagttgcgtttggaacttcaacaagctcgcacggaagtcgagacggcggataagtggcgtcttgaatgcgtcgatgtctgcagtgtgctgacaaaccgattggaagagctggctggtttcctcaactctctgctgaagcacaaagatgttcttggcgtgttggccgctgatcgacgcaatgccatgcgtaaggcggtggatcgcagcttggatctttccaagagtcttaatatgactctgaatataacagctacatccttggctgatcaaagcctcgctcagctgtgcaatctatccgagatcttgtacaccgaaggtgatgcaagccacaaaactttcaattcccacgaagagctgcacgccgctacttcgatggctccgactgtagagaacttaaaggccgagaataaggctcttaaaaaggagttggaaaagcgacgcagctcagaaggacagaggaaagagcgccgctccttaccgctgccctcccagcagttcgataaccagagcgagtcagaggcctggtcagagcctgaccgcaaggtttccttggcacgcattggcctggacgaaacctccaacagtttggcagcgcctgagcaggcgatcagcgagtcggagagcgagggaagaacctgtgctacccgtcaggatcgcaatcgcaacagtgagcgtattgcccagctggaggagcagattgcccagaaagacgaacgtatgcttaatgtgcaatgccaaatggtggagctggacaatagatataagcaggagcaattgcgctgcctcgatattactcaacaattggagcaattgcgtgctatcaacgaagctctgactgcagacctgcatgctataggatcacacgaagaggaacgcatggtcgagttgcaacgccagctggagcttaagaaccagcagattgatcaactaaaactggcccacagcactctgacggcagattcgcagataaccgagatggagctgcaggcgttgcagcagcaaatgcaggaaatagagcagctgcacgccgattcagtagaaaccctgcaatcccagctacagaaactcaaactagatgccgtgcagcagctagaagagcacgagcgcctgcatcgcgaggctcttgaacgcgactgggtggcactgaccacttaccaggagcaggctcaacagttgttggaactgcaacgatccctggactatcaccaagaaaatgagaaggagctgaagcagacgcttgtcgagaacgagctggccacgcgggccctcaaaaagcagctagacgaaagcactctgcaggcctccaaggcggtgatggagcgcacaaaggcctacaacgacaagctgcaactggagaagcgttccgaggaattgaggctgcaactggaggcgctcaaggaagagcatcaaaagctgctgcagaagcgctccaacagcagcgacgtttcccagtccggttacacatccgaagaggtggcggtgcccatggggccaccttcgggtcaggctacaacgtgcaaacaggctgctgccgcagttttgggccagagggtgaacacatcatctcccgatctgggcatagaaagcgatgccggcaggatatctagcgtagaagtatccaacgcccaacgtgcgatgcttaagactgtagagatgaaaacggagggatcagcgagtccaaaggcaaagtcagaggaatctacatcaccggacagcaagagcaacgtggcaactggtgcagccacagtacacgactgtgccaaggtagatcttgaaaacgccgagttgcggcgcaaactaatccgcaccaagcgcgcatttgaagacacctacgaaaagttgcgtatggctaacaaagcaaaagcacaagttgagaaagacatcaaaaatcaaatactaaaaacgcacaatgtgctgcgaaacgttcgctcaaacatggagaatgagttataacgatcgcgccgacgtccagtatatcagcattaacccgagaggccattcacccaatgttcaattgccatttcttgccattcttatattttgtatgcattgtattttgttgtctcgttgctaacttgatatcaattatttatgtgttttcttctattttttttttttgtttaaaaagaccgtaaacaacgaagctattagtacgaaatacccatgcattttctaaagactgttgagggaatcgaacccattgaatgaactatcacacacacacacacacacacctgttttaagcacaaaacgaaactaacttgaaacttgaagtgctgaaaatatgtatctaacccggcgcactcattcatattgaatgacacatgtatattagaatgtatatatatatatatcccctagtaccataactttaacgaatattctctagcatactcgacctgattcttgtctcgcataaccctccattttccaatcatttgcgtgtagtgactgcctgattaatgtattctcctgctgcttaactgctcttaatccttgatttcagttaaccatcgaaacggatattgaaataattgtttgacttgccggacaaaacagtttagctacgttgccatccaataaccctttttgttcgaaacatccatttgtacaatgtgtaaaaagtagtgtgcgttgtcctggagaacaagatctagaacttaagtcatttgtacccgtcgttttatggaataaacaattgcgttagaatta

SEQ ID NO: 128 - protein, 1148 aa, Drosophila melanogaster
MDQSKQVLRDYCGDGNGTCASSLKEITLIETVTSFLEENGAAEIDRRVLRKLAEALSKSIDDTSPGALQDVTMENSYASFDVPRPPGGGNSPLPSQGRSVRELEEQMSALRKENFNLKLRIYFLEEGQPGARADSSTESLSKQLIDAKIEIATLRKTVDVKMELLKDAARAISHHEELQRKADIDSQAIIDELQEQIHAYQMAESGGQPVENIAKTRKMLRLESEVQRLEEELVNIEARNVAARNELEFMLAERLESLTACEGKIQELAIKNSELVERLEKETASAESSNANRDLGAQLADKICELQEAQEKLKERERIHEQACRTIQKLMQKLSSQEKEIKKLNQENEQSANKENDCAKTVISPSSSGRSMSDNEASSQEMSTNLRVRYELKINEQEEKIKQLQTEVKKKTANLQNLVNKELWEKNREVERLTKLLANQQKTLPQISEESAGEADLQQSFTEAEYMRALERNKLLQRKVDVLFQRLADDQQNSAVIGQLRLELQQARTEVETADKWRLECVDVCSVLTNRLEELAGFLNSLLKHKDVLGVLAADRRNAMRKAVDRSLDLSKSLNMTLNITATSLADQSLAQLCNLSEILYTEGDASHKTFNSHEELHAATSMAPTVENLKAENKALKKELEKRRSSEGQRKERRSLPLPSQQFDNQSESEAWSEPDRKVSLARIGLDETSNSLAAPEQAISESESEGRTCATRQDRNRNSERIAQLEEQIAQKDERMLNVQCQMVELDNRYKQEQLRCLDITQQLEQLRAINEALTADLHAIGSHEEERMVELQRQLELKNQQIDQLKLAHSTLTADSQITEMELQALQQQMQEIEQLHADSVETLQSQLQKLKLDAVQQLEEHERLHREALERDWVALTTYQEQAQQLLELQRSLDYHQENEKELKQTLVENELATRALKKQLDESTLQASKAVMERTKAYNDKLQLEKRSEELRLQLEALKEEHQKLLQKRSNSSDVSQSGYTSEEVAVPMGPPSGQATTCKQAAAAVLGQRVNTSSPDLGIESDAGRISSVEVSNAQRAMLKTVEMKTEGSASPKAKSEESTSPDSKSNVATGAATVHDCAKVDLENAELRRKLIRTKRAFEDTYEKLRMANKAKAQVEKDIKNQILKTHNVLRNVRSNMENEL

SEQ ID NO: 129 - DNA, 2784 bp, Drosophila melanogaster
cttggcgctgtaaatttgaaggtaacgaactaaaagagagatcgattccagcaacaaaacaagaagaaacccaactcccgtatatcaaattagttgcaaaaacgagctgacaacatgaaggcagtacccaggacgccgatgcgtgtcgtcccgaaaactccgcgggtgcatcaaacggtggagaaacagcgacgagacacctccgacaaggccagggatccagtgaatgtgttctgtcgagtgcggccactacaatccgacgcagatctcacctccctaagggtcaagaactccacgacgatcgcactgaatccgcaggatcagctgctgcagcatcacaagccacacaacggcgcccagcgcgaggttcagtacatattcaagcacgttttccagccggatgccacgcagcaggatgtgtacgcagctgtggcccagccgttggtggagaacctactgaaaggccgaaacagtctgcttttcacctacggcgtgactggaagtggaaaaacgtacaccatgaccggcaacctgcgacaccgcggcatcatgccgcgctgcctggacgtgctctttcgcaccatttcagattaccaggccaagaagttcgtcttcaagccggacaagcttaatggcttcgagatcctgtccgaagaggatgcgcttttggagcgccaacacgagatgaaccagcgttttgctggctcaggacgatttgccttcaggcacaaggactcggatccggaaattgcatcccaggcctccgtggagccaattccgctgctgggtttggatgaggacaacatgtactcggtgtttgtcacctatattgaaatttacaataacagcgtctacgacctccttgaggactcgggtatacagaagactttgcagagcaaaatcattcgtgaagatgccaatcgacacatgttcgtccacggcgtcacagaggtggaggtcaagaccgtggaggacgccctcgaggtctttcaaatgggccagaagcgcaaacgaatgggacacactgttctcaatgcagaatccagtaggagtcactcggtgttcaatatacgcttggtgcaggcgcccactgatagccagggtgagaatgtggttcaggaccggcaaaacatcacagtgagtcaactgtccctggtggatctggcgggcagtgagcgatcctcaaggaccaagaacaccggtgtgcgactccgtgaggcgggcaacatcaataattcgctgatgacgctgcgcacttgcctggaatatctgcgcgagaaccaactcgcggctagcaatggattggcacccaagaaggtcccctatcgagactccaagatcacacacatgtttaaaaactacttcgatggcgaaggccaggtgtccatgattgtgtgcatcaacccaagaattgaggactatgatgagaatatgcaagtgatgaagttcgccgagatgacccaggaggtgcaaattgctcgggcgactcctatgaagcaagatttgggtctgactcccggccgtcgcaaggccaacaagctgttcaagattgccgttaataatctaaacgagctgggcattcctgaggccaaggatttggaggtggacgtgggtttggtgtacagtttgggacccgattttcccgcctacgaaatggacagtcccgaggcacagatcaaaatccgcgagctaatgcattatctggagcagcgcatagaaaagcgaaagaagctgcgtgccaacttggacattaaatgtgacagcttccggcagatgctgatgaaccttgaccgcgacaatcttcagctgcgcacggagctcgcctccttaaaggctgtttacaagcaggagcgcgatcgcagtgcggcactcgagaagaaggttcgcatccacgagagctccattgacgtgcttaacaatacgctaagcaagcaagaacggcagattgaagagctgactttcaagctgaacgagaaggagaatatgctcacccaaaaggagcacgagaaggaaaagcaaaagaagaagttcagctccaagctggccgttgagtcggacaaaaataagcgagagtttgaactaaagctgcgtgaacagcgagtgaaattgcaggaacgcatgcgcatcaaggacgagaagttgcgattggtctccaacattctgcagtccgaagatctgcccagtttgccgcggtcacagagctcggaaaacatacttaatgagaaagatcgcggtgcatatacggcgcgcacggaggagtcctcggtgccagctacacgaacagatatatatgcaacgccacgtcatggtgcagcagcggccaacaatcggcatagacgctctcgatccgcaggcgacaagtggctggagcatcgggcagctaatcccgttccgcttggcactattatgcagccgtatctgaagaatcgcaaatccgtaacgaaactaaccgacttgaaggagttgactgctcacggaactacgaagtactgtctcgtctcgcaggatgcggatacggatggcgatgtggagacgaagctgtataagggcaatgtaattcccacttgtggcggtggtgcccaagttgtgttcaacgatgtggagtgcctcaagcagaagtcaccggttcactcgcccacgcgaaagcgacccagcaatggcaacatttcggctctgggcggcggtgcagtgcccagcacggtcacctcagcccaggacgtagcctcccgctgcaatctcggcattgagggacacagcagcaagaagtcgaaaatctaaaaatga

SEQ ID NO: 130 - protein, 887 aa, Drosophila melanogaster
MKAVPRTPMRVVPKTPRVHQTVEKQRRDTSDKARDPVNVFCRVRPLQSDADLTSLRVKNSTTIALNPQDQLLQHHKPHNGAQREVQYIFKHVFQPDATQQDVYAAVAQPLVENLLKGRNSLLFTYGVTGSGKTYTMTGNLRHRGIMPRCLDVLFRTISDYQAKKFVFKPDKLNGFEILSEEDALLERQHEMNQRFAGSGRFAFRHKDSDPEIASQASVEPIPLLGLDEDNMYSVFVTYIEIYNNSVYDLLEDSGIQKTLQSKIIREDANRHMFVHGVTEVEVKTVEDALEVFQMGQKRKRMGHTVLNAESSRSHSVFNIRLVQAPTDSQGENVVQDRQNITVSQLSLVDLAGSERSSRTKNTGVRLREAGNINNSLMTLRTCLEYLRENQLAASNGLAPKKVPYRDSKITHMFKNYFDGEGQVSMIVCINPRIEDYDENMQVMKFAEMTQEVQIARATPMKQDLGLTPGRRKANKLFKIAVNNLNELGIPEAKDLEVDVGLVYSLGPDFPAYEMDSPEAQIKIRELMHYLEQRIEKRKKLRANLDIKCDSFRQMLMNLDRDNLQLRTELASLKAVYKQERDRSAALEKKVRIHESSIDVLNNTLSKQERQIEELTFKLNEKENMLTQKEHEKEKQKKKFSSKLAVESDKNKREFELKLREQRVKLQERMRIKDEKLRLVSNILQSEDLPSLPRSQSSENILNEKDRGAYTARTEESSVPATRTDIYATPRHGAAAANNRHRRSRSAGDKWLEHRAANPVPLGTIMQPYLKNRKSVTKLTDLKELTAHGTTKYCLVSQDADTDGDVETKLYKGNVIPTCGGGAQVVFNDVECLKQKSPVHSPTRKRPSNGNISALGGGAVPSTVTSAQDVASRCNLGIEGHSSKKSKI

SEQ ID NO: 131 - DNA, 996 bp, Drosophila melanogaster
atgccggaagaaccagagaaaacggcggacgacaagcgcagtcacttgccgtggattgagaagtaccgccccgtgaagttcaaggagatagtgggcaatgaggataccgtagcaagactatccgtattcgccacccagggaaatgcacccaatattattattgctggtcctcctggcgtgggcaagacaaccaccatccagtgtctggccaggattctcctgggagacagctacaaggaggctgtcctcgagctgaatgcctccaatgaacgaggaatcgatgtggtccgcaacaagatcaagatgtttgctcagcagaaggtgacactgccgcggggcaggcacaagattgtgattctggacgaggcggacagcatgacggagggtgcccagcaggcactgcgccggaccatggagatctacagcagcaccactcgttttgccctggcctgcaacaccagcgagaagatcatagagcctatccagtcccgctgcgccatgctacgattcaccaagctgtccgatgcgcaagttctggccaagctcatcgaggtggccaagtgggagaagcttaactacacggaggacggacttgaggccatcgtattcactgcccaaggtgatatgcgacagggactgaacaacctgcagtccaccgctcagggatttggcgacatcaccgctgagaacgtctttaaggtctgcgacgagccgcacccaaagctcctagaggagatgatccaccattgcgctgctaacgacatacacaaggcctacaaaatcctggccaagctgtggaagctgggatactcgccggaggacatcattgcgaacatattccgtgtctgcaagcgcatcaacatcgatgagcatttgaagctggactttatccgtgagatcggaatcacccacatgaagattatcgatggtatcaactcgctgctgcagctcaccgcccttctggccaaactctgcattgccgccgagaagcattag

SEQ ID NO: 132 - protein, 331 aa, Drosophila melanogaster
MPEEPEKTADDKRSHLPWIEKYRPVKFKEIVGNEDTVARLSVFATQGNAPNIIIAGPPGVGKTTTIQCLARILLGDSYKEAVLELNASNERGIDVVRNKIKMFAQQKVTLPRGRHKIVILDEADSMTEGAQQALRRTMEIYSSTTRFALACNTSEKIIEPIQSRCAMLRFTKLSDAQVLAKLIEVAKWEKLNYTEDGLEAIVFTAQGDMRQGLNNLQSTAQGFGDITAENVFKVCDEPHPKLLEEMIHHCAANDIHKAYKILAKLWKLGYSPEDIIANIFRVCKRINIDEHLKLDFIREIGITHMKIIDGINSLLQLTALLAKLCIAAEKH

SEQ ID NO: 133 - DNA, 11558 bp, Drosophila melanogaster
agccatccagtgcggttggatgagctccaccaaaggaatacgaaaagaacagtgaaaaaagtgaaatacagcagataagaaagtgaaatacatacataagtgaaccgggaaagaaagagatagaaccggaagtggtccgtggagaaaggactgtcgttatcgcagcgcgggtgcttgaactctcggcacaatggggcacggagtggcctccattggggctctgctagtaatcctggccatctcctattgccaggcggagctaacgccaccatatttcaatctggccacgggcaggaagatttatgccacagctacgtgtggccaggatacggatggaccagagctctactgcaaactagtgggagccaatacggaacacgatcatatcgactattcagttatccagggacaggtctgcgattactgcgatcccacggtgccggagaggaatcatccgccagagaacgcgatcgatggcaccgaggcctggtggcagagtcctccgttgtccaggggcatgaaattcaatgaagtcaatttgaccatcaacttcgaacaggaattccatgtggcctatttgttcattcgcatgggcaactcccctcgtccgggtctctggacgctggagaagtccacggattatggcaagacctggacgccttggcagcacttttccgatacccccgccgattgtgagacgtactttggcaaggacacctacaagccaattacccgcgacgacgacgtcatctgcaccactgaatactcaaagattgtgccgctggagaacggcgagattcccgtgatgctgctcaatgagcgacccagttccaccaactacttcaactcaacggtgctgcaggaatggactcgtgccactaacgtcaggattcgtctgcttcgcaccaagaatcttttgggacatttgatgtctgtggctcgacaagatcccacggtgacgcgtcgctacttctactcgatcaaggacatctcgatcggaggaaggtgcatgtgcaatggacacgccgacacctgtgacgtcaaggacccgaagagcccagtccgcatcctcgcatgccgttgccagcatcacacgtgcggcatccagtgcaacgagtgctgtcctggattcgagcagaaaaagtggcgccaaaacaccaatgcccgaccattcaactgcgaaccctgcaactgtcatggtcacagcaacgagtgcaagtacgatgaggaagtgaaccgcaagggactgtccctggacattcacggacactacgatggtggtggtgtttgccagaactgtcagcacaataccgtgggaattaactgcaacaagtgcaagccgaaatactatagacccaagggcaagcactggaacgagaccgatgtctgcagcccctgccaatgcgactacttcttctccaccggacactgcgaggaggagaccggaaactgtgagtgccgtgctgccttccaaccgccaagttgcgactcctgcgcgtatggatactatggttaccccaattgccgggagtgcgaatgtaatctgaatggaaccaatggctaccactgcgaggctgaaagcggacagcagtgcccgtgcaagatcaatttcgcgggggcctactgtaagcagtgcgccgaaggatactacggattccccgagtgcaaggcatgcgagtgcaacaaaatcggctcgattaccaacgactgcaacgtgaccactggagagtgcaagtgcttgaccaatttcggaggcgacaactgcgagcgctgcaagcacggatacttcaactaccctacttgctcatactgcgactgcgacaaccagggcacggagtcggaaatctgcaacaagcagtctggccagtgcatctgtcgtgaaggttttggaggcccaagatgcgatcagtgcttgccaggattttacaactatccggactgcaagccatgcaactgctccagcacgggtagttcggcgatcacctgcgacaacacgggcaaatgtaactgcctcaacaactttgccgggaaacagtgcacgctctgtactgccggatactacagctatccggattgtctacggagtgtcctgtaattcagacggacagtgcttgtgtcagcccaactttgacggacgtcagtgcgattcctgtaaggagggcttctacaacttccccagctgcgaggactgcaactgtgatcctgcaggagtgatcgataagttcgccggatgcggatcggtgcccgtgggtgagctctgcaagtgcaaggagcgagtgacgggcaggatctgcaatgagtgcaagccattgtactggaacctgaacatcagcaatactgagggatgtgagatttgcgattgttggacagatggtactatttccgcactggacacctgtacctcgaagtccggacagtgtccctgcaagccgcatactcaaggcaggcgctgccaggagtgtcgggatggtaccttcgatctggacagtgcctcgctgtttggctgcaaggactgcagttgcgatgtgggcggctcgtggcaaagtgtttgcgacaagatcagcggacagtgtaagtgccacccgaggattacgggtctggcatgtacccagccactgaccacccacttcttcccaacgctgcatcagttccagtacgaatacgaggatggatcactaccatcgggcactcaggtgcgctacgactacgatgaggcggcattccccggatttagcagcaagggctatgtggtgttcaacgccattcagaacgatgtacggaacgaggtcaatgtctttaagtcatctctgtatcgtattgtcctgcgatatgtgaatccaaatgccgagaatgtcactgccaccatttcggttacttcagacaatcctctggaggttgatcagcacgttaaggttctactgcaacccacatcggaacctcagttcgtaactgttgcgggtcccttgggagtgaaaccctcagccattgttttggatccgggtcgttatgtatttaccaccaaggccaacaagaatgtgatgcttgattactttgttctcctacccgccgcttactacgaagccggaattctaacgcgccacatctcaaatccctgtgaactgggcaacatggagctgtgccgtcactacaagtacgcctctgtggaagtgttctcaccagcggcaactccattcgtcatcggtgaaaactccaagccgaccaatcccgtcgagacgtacactgatccggagcatctgcagattgtgagccatgtcggtgatattcccgtactgagcggatcccaaaatgagctgcactacatcgtggatgtgccacgaagtggccggtatatcttcgtgattgactacatcagcgataggaacttccccgacagttactatatcaacttaaaactaaaggataatccagattcggaaacatccgtgctgttgtatccatgcttatactcgactatttgccgaacatcagttaacgaggatggtatggagaagtcattctatattaacaaagaggatttgcagccagtcatcatctccgctgacatcgaagatggttctcgtttcccgattatctcggtgacagcaattcccgtcgaccaatggtccattgactacatcaacccaagtcccgtctgtgtgatccatgatcagcaatgcgccactccgaaattccgttccgttcccgattccaagaagatcgagttcgaaactgatcatgaggaccgtattgccaccaacaaacctccatatgcctcactcgatgaacgagttaagctggtccacttagacagtcaaaatgaagcaaccatcgtgattgaatcaaaggttgatgctacaaaaccgaatctatttgtgatcctggtgaagtactaccaaccgagccaccccaaataccaggtgtactacacgctgacagcgggcaagaaccagtacgatggcaagttcgacattcagcactgtccatcgagttccggatgccgcggtgtgatacgccccgccggagagggttcgttcgagattgacgacgagttcaagttcacgattacgaccgatcgatcccagagcgtttggctggactacctggtggtggttcccttgaagcagtacaatgatgacctactggtggaagagaccttcgaccagaccaaggagttcattcagaactgcggccatgaccacttccacataacccacaatgccagtgatttctgcaagaaatccgttttctctctaacagccgattacaatagtggagcattgccttgcaattgcgactacgccggatccacgagcttcgagtgtcatccgttcggaggtcagtgccagtgcaagccgaatgtgattgagcgcacgtgcggagcctgtcgcagtagatactacggattccccgactgcaagccatgcaagtgtcccaatagcgccatgtgtgagcccaccactggtgagtgcatgtgtccgcccaatgtcattggggatttgtgcgagaagtgcgcccccaacacctatggattccatcaggtcattggctgcgaggagtgtgcatgcaatcctatgggcattgccaatggaaactcccagtgcgatctgttcaatggaacctgcgagtgtcggcaaaatatcgagggcagggcctgtgatgtttgctccaatggatactttaacttcccgcactgcgagcagtgcagttgccacaagcccggcaccgaactggaggtgtgtgacaagatcgatggcgcatgcttctgcaagaagaatgtggttggaagggactgtgaccagtgtgtcgatggaacatacaatctgcaggagtcgaatccggatggttgcaccacttgcttctgctttggcaagacttcgcgatgcgacagtgcctatctcagagtttacaatgtgagcctgcttaagcatgtgtccatcactactccggaattccacgaggagagcatcaagtttgatatgtggcccgtacccgcggatgaaattcttctgaatgagaccacgctgaaggcagactttaccttacgggaggtcaacgatgaacgacctgcgtactttggggttctggactatctgcttaaccagaataatcacatctctgcttatggcggagacctggcttatactttacatttcacttctggcttcgacggcaaatacattgtggctccggatgtaattttgttcagtgaacacaatgccctggtccatacaagctatgagcagcccagccgaaatgaaccattcaccaaccgcgtcaatatagtggaatcgaatttccagacgatttccggaaaaccagtttcacgagctgatttcatgatggttctgcgggatctaaaagtaatctttatcagagccaactattgggaacagaccttggtgacccacctgtccgatgtgtatctaactctagccgatgaggatgcagatggcactggcgaataccagttcctggccgtggagcgttgctcctgcccacctggttactccggacactcgtgcgaggactgtgccccgggctactaccgagatcccagcggaccttatggtggttactgcattccctgcgagtgcaatggacattcggagacctgtgattgcgctaccggaatctgttcaaagtgccagcatggaacagagggtgatcactgtgagcgctgtgtgtccggttactatggaaacgccacgaatggaacacccggagattgtatgatctgcgcttgcccactgccatttgactcgaacaactttgccaccagttgcgaaatctccgagagcggagaccaaatccattgtgagtgcaagccaggatatacaggaccacgttgcgagtcttgcgccaatggtttctatggagagccagagagcataggacaggtgtgcaagccgtgcgagtgttccggtaacatcaatccagaggatcagggatcttgcgacactaggaccggtgaatgtcttcgctgcttgaataacaccttcggtgctgcctgtaatctgtgtgcacctggattctatggcgatgctatcaagctaaagaactgccagagctgcgactgcgatgatctgggcacccagacgtgtgatccctttgtgggcgtctgcacctgtcacgagaacgtcattggcgaccgttgcgatcgctgtaagccggatcactatggatttgagtcaggtgttgggtgccgagcctgcgactgcggtgctgcctccaattcaacgcagtgtgacccacacacaggtcactgtgcctgcaagtcgggagtgacaggacgacagtgcgatcgatgcgccgttgaccattggaaatacgaaaaggacggttgcactccgtgcaattgcaatcagggatactcacgaggattcggttgcaatcccaacaccggcaagtgccaatgtctgccaggagtaattggagatagatgcgacgcttgtccgaatcgatgggttctgatcaaggatgaaggctgtcaggagtgcaacaactgccaccacgcccttttggatgtcactgatcgaatgcgctatcagatcgatagtgtcctggaggactttaacagtgtaaccctggccttcttcaccagtcaaaaattgaactattacgaccagctggccgatgaactggagcccaaggttaagctattggatcccaacagcgtggacctgagtccatccaaaaaggccaacagcgaattggaatccgatgccaagtcctatgccaaacaggtcaaccagaccctggccaacgccttcgatatccgtgagcgatcgagcaccactttgggtaacataacagttgcttatgatgaggcggtcaagagtgccgaccaggccaaagaggccatcgcttcggtggaagctctttccaagaatctcgaggcggcagcgagcacaaagattgatgctgctctggagcaagcacagcacattttgggacaaatcaacggaaccagcgcaaaacaagagcctcaatgccctcaagaatgatattggagaattcagcgaccatctggaagatcttttcaactggagcgaagcttcacaagccaagtccgctgacgttgagcgccgcaatgtggccaaccagaaggcctttgacaactctaaattcgacaccgtttcggagcaaaagctacaggcagagaagaacatcaaagatgctggcaatttcctcatcaatggcgatctgaccctgaatcaaattaatcagaagttggataacttgagagatgctctaaacgagctcaattcgttcaataaaaatgtggacgaagaattacccgtgagggaggaccagcataaggaggcggatgcccttaccgatcaagccgaacagaaggcggccgaattggccattaaggcccaagatctggctgcccaatacacggatatgaccgccagtgcggagccggccatcaaggccgcaactgcctactcgggaatcgttgaggccgttgaagctgcccagaaactcagtcaggatgcaatctctgcggccggaaatgccactgataagacagatggcattgaagagagagctcatctcgctgacactggatctactgatcttctccagagagcacgccagtctctgcagaaggtacaagacgacctagagccccgtctgaacgcttcggccggcaaggtgcagaaaatctcagccgtgaacaatgccaccgaacaccagctgaaggatattaacaagctgattgaccaactgccagctgagtcgcagagggatatgtggaagaattcaaatgccaatgccagtgatgctctggagatactgaagaacgtcctagagatactcgaacctgtgagtgtccaaacgccaaaggaactcgagaaggcacatggcatcaatagagatttggatctgaccaataaggacgtttctcaagctaacaaacaattggatgacgtagaaggatccgtttcgaagctaagcgaattggcagaggatatcgaggaacagcagcaccgtgtgggcagtcagagccggcagttgggccaggaaatcgagaacttgaaggcccaagtggaggctgctcgccagttggccaacagcatcaaggtgggcgtcaatttcaagccaagcacgatcctggaactgaagacaccggaaaagaccaagttgctagccactcgcaccaatctatcgacctatttccgcaccaccgagccatccggtttccttttatatctgggcaatgacaacaagaccgcccagaagaacaacgactttgtggccgttgagattgtgaatggctatccgattcttaccatagatttgggcaatgggccggaacgcatcaccagcgataagtacgtggcagatggtcgctggtatcaggctgttgtggatcgcatgggtccgaatgccaagctaacaattagggaagaactacccaacggtgacgtggttgagcacagcaagtctggctatcttgaaggatcccagaatatccttcatgtggataagaacagtcgcctatttgttggtggctatccgggtatttcggacttcaatgctccgccagacttgaccactaactccttctccggcgacattgaggatctaaagattggcgatgagagcgtaggattgtggaactttgtatatggcgatgataacgaccagggcgccagggagcgggatgtgctgctcgagaagaagaagccggtaactggtctgcggttcaagggtaatggatacgtccaactgaacgccacatcgaacttgaagagccgctccagcatccagttcagcttcaaggcagacaaggatacttccaatggactgctgttcttctacggcagggataagcactacatgagcattgagatgattgacggagctatcttcttcaacattagtttgggtgaaggtggaggcgttcaatccggcagccaggatcgctacaatgacaaccaatggcacaaggtccaggcggaaagggaaaaccgaaacggccttctcaaggtcgacgatatagtaatatcacggaccaatgctccattggaagcggacttggagttgcccaagctgaggagattatacttcggtggtcatccgagacgtctgaatacctcgataagtttgcaacccaactttgatggctgcatcgataatgttgtgatcaaccagggagtggtcgaccttacagaatacgtaactggcggcggagttgaggaaggatgctcggcgaagttctccacggtggtgtcatatgcgccgcatgagtacggattcctgaggatgaacaacgtttcctcagataacaatctgcatgtggttctgcacttcaagaccacgcaaccgaatggcgtactcttctatgccgccaatcatgaccagagttccaccattggcctcagcctacaagatggtttgctcaagctcaacagcatgggcagtcagttggtaatcgacgatcgtattctgaacgatggcgaggatcatgtggttacagttcagcacacccaaggtgaacttcgtcttacggtcgatgatgtagataacaagagacttggttctccacaaccattaatcctggagggtggtgacatcttctttgctggcttgccggacaactatcgaacaccgaggaacgcgttggcctctttggcctactttgtcggttgcatcagcgatgtaaccgtgaacgaggagatcattaactttgccaacagtgctgagaagaagaatggcaacatcaacggttgcccaccacatgtactagcctacgaaccaagtttggtgcccagttactacccaagtggagacaacgaggtggagtctccgtggtcaaacgccgatactctgcccccacttaagccagatattgaaagcacactaccgcccacaacgcccactacgaccaccacgacaactaccacaacaacatcgactactacaacttcaacaacgacaactactacgacaccatccccgatagtcattgatgaggagaaggagattgaggcgaaaacaccgcaaaagatcctaacaacgcggccaccagccaagctgaaccttcccagcgatgagcgctgcaagttgccggagcaacccaatttcgatgttgatttcacagaggcgggttaccgattctatggactgcgggagcagcgcctgcagattaactcactgccggtgaaggtacgccgtcaccatgacattggcatctcattccgtactgagcgaccaaacggtctgctcatttatgccggaagtaagcagcgcgatgacttcatagccgtgtatcttctggacggtcgggtgacatacgagatacgggtgggtgcacagttgcaggccaagatcactaccgaggcggagctgaacgacggcacctggcacaccgtggaggtggtgcggacccaacgcaaggtatccctgctcatcgacaagttggagcagccgggttccgtggatctgaatgcggaaagatccgctccggtattggctgtcgagttgcccatctatctgggcggagttaacaagttcctggagtcggaggttaagaatctcaccgatttcaagactgaagtaccgtactttaacggctgcctcaagaacatcaagttcgacgctatggatctggaaacaccaccggaggagtttggagtggttccgtgctctgagcaggtggaacgcggtttgttcttcaataaccagaaggcgtttgtaaagatctttgatcacttcgatgtgggcactgagatgaaaatcagcttcgatttccgaccgagggatcccaacggattgctcttctctgtgcacggcaagaactcttatgccatactcgagctagtagacaataccttgtactttaccgtgaagaccgatctgaagaacattgtgtccaccaactataagctgcccaacaacgaaagcttctgcgatggcaagacgcgcaatgttcaggccatcaaatccaagtttgtgatcaacatagccgtggatttcattagctccaaccccggcgtgggcaacgaaggatcagtgatcacaaggaccaatcgtccgctgttcttgggcggacatgtggccttccagagggccccgggcatcaagaccaagaagtcctttaagggctgcatcagcaaggtggaggttaaccaaaggatgatcaacatcacgccgaacatggtcgttggcgatatttggcagggctattgtcccctcaactaataaagaacttcggaacgacttaaggacctatgatttatttggacaacgactacgaaaaactgccaggaagaatcttcttttgccgacaactgctaatcaaaggacaacgaacgatcaaatttcaaacgaacaaaatcgacgggtcataaaaaagtcataaggtcttcaaagtaatagatccttagcaaagatgccagtcgtatatattcctagtactataagccaaactgcgtgccaattctattaaagccatttacatttatatatcctttttaaaactccttaagagaatcttgcatttttgtaattccaataaaccaataaaataaacattttaatgaaac

SEQ ID NO: 134 - protein, 634 aa, Drosophila melanogaster
MGHGVASIGALLVILAISYCQAELTPPYFNLATGRKIYATATCGQDTDGPELYCKLVGANTEHDHIDYSVIQGQVCDYCDPTVPERNHPPENAIDGTEAWWQSPPLSRGMKFNEVNLTINFEQEFHVAYLFIRMGNSPRPGLWTLEKSTDYGKTWTPWQHFSDTPADCETYFGKDTYKPITRDDDVICTTEYSKIVPLENGEIPVMLLNERPSSTNYFNSTVLQEWTRATNVRIRLLRTKNLLGHLMSVARQDPTVTRRYFYSIKDISIGGRCMCNGHADTCDVKDPKSPVRILACRCQHHTCGIQCNECCPGFEQKKWRQNTNARPFNCEPCNCHGHSNECKYDEEVNRKGLSLDIHGHYDGGGVCQNCQHNTVGINCNKCKPKYYRPKGKHWNETDVCSPCQCDYFFSTGHCEEETGNCECRAAFQPPSCDSCAYGYYGYPNCRECECNLNGTNGYHCEAESGQQCPCKINFAGAYCKQCAEGYYGFPECKACECNKIGSITNDCNVTTGECKCLTNFGGDNCERCKHGYFNYPTCSYCDCDNQGTESEICNKQSGQCICREGFGGPRCDQCLPGFYNYPDCKPCNCSSTGSSAITCDNTGKCNCLNNFAGKQCTLCTAGYYSYPDCLRSVL

SEQ ID NO: 135 - DNA, 1462 bp, Drosophila melanogaster
cggccacactgtctggccaccaaaatcccaaacttaattaaagaattaaataattcgaataataattaagcccagtaacctacgcagcttgagtgcgtaaccgatatctagtatacatttcgatacatcgaaatcatggtagtgttggagacggagaagttttttggttaataatacacaagtgaagagcgaactgcaggggagcgagatatcacgaaacaatccaaaatccacacacactcaaacagaaatcaaaagcttcgctctctcgcacacacacgcaccaaccaactatcaactatcacaaacaccgcgacagagagagagcggcaagtgaatcacggcgaatcgaaaccgatccgaacccactccggagccgaaaaagaactgatcctaccatcaaacgcatccaataaacacggccgccaacatgcagagcgactttcacagaatgaagaactttgccaatcccaagtccatgttcaaaaccagcgcccccagcaccgagcagggtcgtccggaaccaccaacttcggctgcagcgcccgccgaggctaaggatgtcaagcccaaggaggacccacaggagactggtgaaccagcaggcaacactgcaaccactactgctcctgccggcgacgatgctgtgcgcaccgagcatttatacaaacacccgctcatgaatgtctggacgctgtggtaccttgaaaacgatcggtccaagtcctgggaggacatgcaaaacgagatcaccagcttcgataccgtcgaggacttctggagcctatacaaccacatcaagcccccatcagagatcaagctgggtagtgactactcgctattcaagaagaacattcgtcccatgtgggaggatgcagccaacaaacagggcggtcgttgggtcattacccttaacaaaagctccaagaccgatctggataacctatggctcgatgtgctgctctgcctgattggtgaggccttcgatcactctgatcagatctgcggcgctgttataaacattcgcggcaagagcaacaagatatccatctggactgccgacggaaacaacgaggaagctgcccttgagattggtcacaagctgcgcgatgccctgcgtctgggacgcaacaactcgctgcagtatcagttgcacaaggacacgatggtcaagcagggctccaacgtgaaatcgatctacactttgtaggcggctaataactggccgctccttattcggtccgatcccacactgattattttgtctttcatttatttatcgttataagcaacagtagcgattaatcgtgactattgtctaagacccgcgtaacgaaaccgaaacggaaccccctttgttatcaaaaatcggcataatataaaatctatccgctttttgtagtcactgtcaataatggattagacggaaaagtatattaataaaaacctacattaaaaccgg

SEQ ID NO: 136 - DNA, 1132 bp, Drosophila melanogaster
gccacactgtctggccaccaaaatcccaaacttaattaaagaattaaataattcgaataataattaagcccagtaacctacgcagcttgagtgcgtaaccgatatctagtatacatttcgatacatcgaaatcatggtagtgttggagacggagaagaccagcgcccccagcaccgagcagggtcgtccggaaccaccaacttcggctgcagcgcccgccgaggctaaggatgtcaagcccaaggaggacccacaggagactggtgaaccagcaggcaacactgcaaccactactgctcctgccggcgacgatgctgtgcgcaccgagcatttatacaaacacccgctcatgaatgtctggacgctgtggtaccttgaaaacgatcggtccaagtcctgggaggacatgcaaaacgagatcaccagcttcgataccgtcgaggacttctggagcctatacaaccacatcaagcccccatcagagatcaagctgggtagtgactactcgctattcaagaagaacattcgtcccatgtgggaggatgcagccaacaaacagggcggtcgttgggtcattacccttaacaaaagctccaagaccgatctggataacctatggctcgatgtgctgctctgcctgattggtgaggccttcgatcactctgatcagatctgcggcgctgttataaacattcgcggcaagagcaacaagatatccatctggactgccgacggaaacaacgaggaagctgcccttgagattggtcacaagctgcgcgatgccctgcgtctgggacgcaacaactcgctgcagtatcagttgcacaaggacacgatggtcaagcagggctccaacgtgaaatcgatctacactttgtaggcggctaataactggccgctccttattcggtccgatcccacactgattattttgtctttcatttatttatcgttataagcaacagtagcgattaatcgtgactattgtctaagacccgcgtaacgaaaccgaaacggaaccccctttgttatcaaaaatcggcataatataaaatctatccgctttttgtagtcactgtcaataatggattagacggaaaagtatattaataaaaacctacattaaaaccgg

SEQ ID NO: 137 - DNA, 1430 bp, Drosophila melanogaster
gaacaacaaaaacagggttgttgcacaagaggggaggcgatagtcgagcggaaaagtgtgcagttggcgtggctacatcatcattgtgttcaccgattattttttgcacaattgcttaatattaattttttttggttaataatacacaagtgaagagcgaactgcaggggagcgagatatcacgaaacaatccaaaatccacacacactcaaacagaaatcaaaagcttcgctctctcgcacacacacgcaccaaccaactatcaactatcacaaacaccgcgacagagagagagcggcaagtgaatcacggcgaatcgaaaccgatccgaacccactccggagccgaaaaagaactgatcctaccatcaaacgcatccaataaacacggccgccaacatgcagagcgactttcacagaatgaagaactttgccaatcccaagtccatgttcaaaaccagcgcccccagcaccgagcagggtcgtccggaaccaccaacttcggctgcagcgcccgccgaggctaaggatgtcaagcccaaggaggacccacaggagactggtgaaccagcaggcaacactgcaaccactactgctcctgccggcgacgatgctgtgcgcaccgagcatttatacaaacacccgctcatgaatgtctggacgctgtggtaccttgaaaacgatcggtccaagtcctgggaggacatgcaaaacgagatcaccagcttcgataccgtcgaggacttctggagcctatacaaccacatcaagcccccatcagagatcaagctgggtagtgactactcgctattcaagaagaacattcgtcccatgtgggaggatgcagccaacaaacagggcggtcgttgggtcattacccttaacaaaagctccaagaccgatctggataacctatggctcgatgtgctgctctgcctgattggtgaggccttcgatcactctgatcagatctgcggcgctgttataaacattcgcggcaagagcaacaagatatccatctggactgccgacggaaacaacgaggaagctgcccttgagattggtcacaagctgcgcgatgccctgcgtctgggacgcaacaactcgctgcagtatcagttgcacaaggacacgatggtcaagcagggctccaacgtgaaatcgatctacactttgtaggcggctaataactggccgctccttattcggtccgatcccacactgattattttgtctttcatttatttatcgttataagcaacagtagcgattaatcgtgactattgtctaagacccgcgtaacgaaaccgaaacggaaccccctttgttatcaaaaatcggcataatataaaatctatccgctttttgtagtcactgtcaataatggattagacggaaaagtatattaataaaaacctacattaaaaccgg

SEQ ID NO: 138 - protein, 259 aa, Drosophila melanogaster
MQSDFHRMKNFANPKSMFKTSAPSTEQGRPEPPTSAAAPAEAKDVKPKEDPQETGEPAGNTATTTAPAGDDAVRTEHLYKHPLMNVWTLWYLENDRSKSWEDMQNEITSFDTVEDFWSLYNHIKPPSEIKLGSDYSLFKKNIRPMWEDAANKQGGRWVITLNKSSKTDLDNLWLDVLLCLIGEAFDHSDQICGAVINIRGKSNKISIWTADGNNEEAALEIGHKLRDALRLGRNNSLQYQLHKDTMVKQGSNVKSIYTL

SEQ ID NO: 139 - protein, 248 aa, Drosophila melanogaster
MVVLETEKTSAPSTEQGRPEPPTSAAAPAEAKDVKPKEDPQETGEPAGNTATTTAPAGDDAVRTEHLYKHPLMNVWTLWYLENDRSKSWEDMQNEITSFDTVEDFWSLYNHIKPPSEIKLGSDYSLFKKNIRPMWEDAANKQGGRWVITLNKSSKTDLDNLWLDVLLCLIGEAFDHSDQICGAVINIRGKSNKISIWTADGNNEEAALEIGHKLRDALRLGRNNSLQYQLHKDTMVKQGSNVKSIYTL

SEQ ID NO: 140 - protein, 259 aa, Drosophila melanogaster; identical to SEQ ID NO: 138

SEQ ID NO: 141 - DNA, 4705 bp, Drosophila melanogaster
tccgcttcgaaaggttgttcgcggatgcgtgtaaacccgcaaagcaaataaactcggagaaccaagtttttgcgattctgattcaagcaaccgaattactttccatacttcgataatataatcccacgtctgctagtgcgtgcaaaaaacagtttgtagttaaaacgaaatactaaaatcagtcgagccctgaagcaacagggaaagtgcatttcgtgagcggcaaatcgactcatattcccgtcacaccagctcaatgcacaatgcaacgctgcagcgagtgatgaaattcaaatgcaaatagccggctaataaacctgttaaagaaaaacaaataatttcgagttattaaagtttcgtgaagatcgagtgaaggagttagataaatttccaatcgcgtgttgcaagttccccagtgggtagctgacaaaaagctggctgctttaagcgcacaatgctgctgaagaagaagcgctatatgttcgacgagcgagacgacaataatattaactcgcccgtcgccgtcgagccaagcagcaacaacaacaaaatggccgatacacgcgaagtgcgcattgaagagcaattaaaagtgaaaattggcgaggcaaagaatctgagcagtcgcaatgcggccaacactagctgcagcacacagggcactcgcgatgtctactgcacaattgcgttggaccaggaggagatctgccgcacacccaccatcgaacgcacactgacgccgttcttcggcgaggagcaccagttcaagattccgcgccgcttccgctacctgaccatctatctgtgggatcgtgatatgaagcaggataaacccattggcaagatagcgatcaagcgggaggagctgcacatgtacaatcacaaggatcactggttctcattgaggccagtcgaccaagactccgaggttcagggcatggttaatgtggaggtggcatttacggaagcccaacagacccagtcgctctccgagggcatagatctgggacagcacacattgcggcatcatcagaacctgccacaccacagccaccagcagcgggcgcatctaaacgattacaaggagaacagtgaactgagtaacatacagcgggcatcagcagctgcagcgagttcctcatcggcagccatgacactcaagacacgagcggccggtctatttggtcacgtgcatcatccgccatcgcagactcagcactttccgatcatcaataccacatccacgtcgtcggatcagttgtccaattggaaatcgcatgggagattcgttggtgtgaccatcaaagtaccagcctgcgtggacctggccaagaagcagggcacgtgcgatccatttgtggtctgtaccgcccactatagcaacaagcaccaggtgacgcgacgaactaagcagcgcaaaaagaccgtggatccggagtttgacgaggccatgtactttgatcttcacatcgatgcggatgcgggtagcacaaataccactggaagtaacaagagtgccggttccctggaatcatcagcgaacaagggctattctatatacccggtgggcggtgcggatctggtggagattgtggtgagcgtgtggcacgacgcacatggagccatgtccgataaagtgttccttggtgaagtgcggctaccaatgctcaataagcaggagcagcaggcagttaatccatcggcttggtactatctacagccccgctccatgacgcacagttcccgctcgctgaacgccacgccccgctcatgtgcgacgccgccgggaacgagattaagcgtggactcgaccattggatcactgcgcttaaatctaaactacaccgccgatcatgtcttcccgctggccacatacgacgatcttatgaatctgctcctggaatcggttgatcagcgacccatcaccgtgtcggctgtgtcgatcctaggcgagctggtctcgggcaagacggaggtggcccagccgctggtgcgactctttacgcacacggagcgcattgcgccgatcatcaaggcgctggctgaccacgagatctcccatctgacagatcccaccactatcttccggggtaacaccttggtctctaagatgatggatgaggcaatgcgattgtctggactgcactacctacatcagacattgcgtccggttttgtcgcagatcgttgccgaaaagaaaccatgtgagatcgatcccagcaagattaaagatcgctctgcggtggacacgaatctgcacaatctgcaagattatgtggagcgggtttttgaggcaatcaccaagagcgctgatcgctgtccgaaagttctgtgtcagatcttccacgaccttcgcgagtgtgcgggtgagcatttccccagcaatcgagaagtgcgctactccgtggtgtccggctttatcttcctgcgcttctttgcacccgctatcctgggaccaaagctcttcgatctgaccaccgagcgactggatgcccaaacgagtcgcacgctgactctcatctccaagacgatccaatcgctgggtaatctggtcagctcccggtcgtcgcaacagacttgcaaggaggagttcaccgtcgagctgtacaagaagttctgcacggaacagcacgtggatgcggttaagcactttctggaggtgatctcgacgcccagtcatgcgagcagcagcgttcatccggcggcggcggcggcaacgccactggaaccagttttacttaaagagggcctgatgaccaagtatccgacatcccggaagcgttttggccggcagttcaaacaacgccacttccgcctcaccacccactcgctcagctatgcgaagtcgaagggcaaacaacccatctgtgatataccgctccaggagatcgccagcgtggagcagctgaaggacaagagtttcaagatgcagaactgctttaagattgtgcacaacgatcgctcgctgattgtgcagacaacgaactgcgtggaggagcgcgagtggttcgacctgctgcacaagatatgtctgatgaactccatccggatgcagtacttccatccctcggcctttgtaagtggattctacagctgctgcggccggtcggatgagaattcaccgggctgtaagaaggtgttggacaagacgatggactacttccagatggatttagtaacggcgctggatccagcgctcgatctgcagcgcatccacacgctgatcatgtctaacatgagtgtgctggagtcactgctagatccgctcacctatcaccagtctctgtcgcagacgcaacaccaacagcacaatcctctggtgccgctggccaccgatctgcagaagcattcaccacaggccttcgctgagttcaagcgaacgattgagaagctgagagagaaggcctatgccatcgatagagatcatcgggactacaagcagggcattacgcggcaactgaaatacggcagcagacaggcacccattggcgatgataactattggcatatgatgcgagccgccggccagttgaatcagcagcatcaccagcagcagcaacatcagcagcaacagcaacagcagcagcagcagcaacttcagcagttccagccgcagccagtgctgccgcaaatgcagaacgttcgggcgtatccttatcagccagctacgagcaacatgaacgcctactgtctgcacaacatgcagtatcagcagcagagattgccgttccatcagcagcaacagcagcaccatcagcagctccagcaacagcagtcgcagttccagcccctgcgcagccatcaactgcagcgccacaacaacaatttgaacaacaataactgcggcaatggatcctcctccagtccatcatcgaccacatcaagtgtggtggccgcaccgcccagcaccacatcgtcatcgcagccagctccaccgatttattagcgttcaaggctgtgcgtattcgctttgccgcgggccattatcacgaccaggtaaaggaatacgcatcgatgtggcaaacacaaccccctaccgctcctacgcaaccagaggatgctgctgtacaaaacgattaattgtgctaatttctaggctcttgtttttttttgtatcatttttacgagtttaacgttgtaaaggtctagactaagtttttttaattaacagtttttatacaccagatttttacggtaccgcctacaccagctacaacaacacgaggagaaaacaagaggaacggaaacgaaatctaaatatttataagcctatttatttttttgtatgtgctaacattatttttacacgaaaacaaaatacccaatatggaaagagcatttctatacttgtgtgagcgcaaagagggcagagaaccactgaaaactgataactttataagcctaaactactaaaaactcagaaactgctaagattttttaaagcctagcctaagttaagtatcggcgggatgatgagtagcgaaatgaaaatgaaaagatgtaaatagcagatacacgagtatatatatatcccacagtatgtatgtacatgtgtatgattaacttcattataccagttaatttaggcgtagcaaaaatttctaaaaaatcaactaaactaggcgttttgcccagaggcgacacacgcgaaaagcaaataattctaacgcaatctgaacgcgagaaaaatactgcgaaaagcatg

SEQ ID NO: 142 - protein, 1163 aa, Drosophila melanogaster
MLLKKKRYMFDERDDNNINSPVAVEPSSNNNKMADTREVRIEEQLKVKIGEAKNLSSRNAANTSCSTQGTRDVYCTIALDQEEICRTPTIERTLTPFFGEEHQFKIPRRFRYLTIYLWDRDMKQDKPIGKIAIKREELHMYNHKDHWFSLRPVDQDSEVQGMVNVEVAFTEAQQTQSLSEGIDLGQHTLRHHQNLPHHSHQQRAHLNDYKENSELSNIQRASAAAASSSSAAMTLKTRAAGLFGHVHHPPSQTQHFPIINTTSTSSDQLSNWKSHGRFVGVTIKVPACVDLAKKQGTCDPFVVCTAHYSNKHQVTRRTKQRKKTVDPEFDEAMYFDLHIDADAGSTNTTGSNKSAGSLESSANKGYSIYPVGGADLVEIVVSVWHDAHGAMSDKVFLGEVRLPMLNKQEQQAVNPSAWYYLQPRSMTHSSRSLNATPRSCATPPGTRLSVDSTIGSLRLNLNYTADHVFPLATYDDLMNLLLESVDQRPITVSAVSILGELVSGKTEVAQPLVRLFTHTERIAPIIKALADHEISHLTDPTTIFRGNTLVSKMMDEAMRLSGLHYLHQTLRPVLSQIVAEKKPCEIDPSKIKDRSAVDTNLHNLQDYVERVFEAITKSADRCPKVLCQIFHDLRECAGEHFPSNREVRYSVVSGFIFLRFFAPAILGPKLFDLTTERLDAQTSRTLTLISKTIQSLGNLVSSRSSQQTCKEEFTVELYKKFCTEQHVDAVKHFLEVISTPSHASSSVHPAAAAATPLEPVLLKEGLMTKYPTSRKRFGRQFKQRHFRLTTHSLSYAKSKGKQPICDIPLQEIASVEQLKDKSFKMQNCFKIVHNDRSLIVQTTNCVEEREWFDLLHKICLMNSIRMQYFHPSAFVSGFYSCCGRSDENSPGCKKVLDKTMDYFQMDLVTALDPALDLQRIHTLIMSNMSVLESLLDPLTYHQSLSQTQHQQHNPLVPLATDLQKHSPQAFAEFKRTIEKLREKAYAIDRDHRDYKQGITRQLKYGSRQAPIGDDNYWHMMRAAGQLNQQHHQQQQHQQQQQQQQQQQLQQFQPQPVLPQMQNVRAYPYQPATSNMNAYCLHNMQYQQQRLPFHQQQQQHHQQLQQQQSQFQPLRSHQLQRHNNNLNNNNCGNGSSSSPSSTTSSVVAAPPSTTSSSQPAPPIY

SEQ ID NO: 143 - DNA, 6366 bp, Drosophila melanogaster
ctacgtgcggttcgtgtgctgtgtgttgaaattacaaatagccaattatccggcattaatcgttttagggctctctcgattttaattgtattatattgtactataatacagatataaacccgatttgatcgagtgtaacggaaatcgacgcgattcccatcaaggtggtccgtacctaataagtgttcacgaatgagagcaaagcagatggcggagagcgtcctgcgtttcaatgtgtgtgtgcgtaaacgagtagaaagcggcggtaaaaaccttctcgtgtaacacaaaacaaattatacaaaacattcaatctcaatatcaaaacgttactgtattgtctattgaaaaacaagtacaagcgtacgcagggaaattggaaaatccattgaaaatcgagagcaacagtcgccggagcggaatcagcggacgaaaacaaaaacgctttaaaaacgcagccgatacagaaagtgccagcgtgtgagtgtgcatatgtgtacgtagttgtgggcaaagagaacggtaaagaataagaaatcgaaaaaaaaaaataaaaaactaactgtggaagtgaaaaatgcgcgactgataaagattgtgataatcacggcataatataacaagcaaaaaagaagaatgaaaagaaaccgcaaccgaattggttgaataatatttaagccaacgccagtgctgcataaatcggtgcacattatcattggaacgttcagtgttgcacatcgctaccgccccacgcataatccaacactcttccccctccccatccagatccacccactcacacacacacacactccgattcggatttcttcgtctgcattataatattgcgcttataatctttcgcgagatgagtcgcttgcaaaagcaaaactacgagatcttaagcggtacaagtacgtcgcgcctcaagaatcatcaacatccccgtgaatcggagtcactagcctacgaggagccagatcaaatggtgcggaatcatctaaatggccagctggtagccaatggcaatggcaaaacgcgaaagaatagcaattccgaaacgatgaccaatgggaaaaagtccaaactgaatacggagggatccggctctggttctggaaagaccttgaactacaataataataacaataacaacaacagcatcagtgccaccaacggtcagtacaccaatagcagcagcaagaccacttcagcatctgcaagggattacacttaccgcgagaccatatcaccgcccacacctccatccccgcccaccacaaatgtggcggatattgtttgcatatcggatgcggagagcgaggacggacgcgatcccgagcgggagtactacgaccaggacatggaggaggatgagccgaacgggatagagatcgatgaatccagctccagcttgtccaaggccaagtccaacaatgcagctgcagcggcggcggcggcggctgcagcagcggcagcagcagcctcgaaggcctcctcgtcgaccacgccctcctacgccatgcccaccagcaatagtacaccccttgatctggacaatgaggcccatcaacgggacctggaggcggtcaccgatctgaaatactacgtaaaattgtacagtgatgaggccgttagtctgaatgacttcaaaataatacgcgttctcggaacaggtgcctatgggcgggttttcctcgttcgcaagctaactagacacgatgccggaaaattgtatgcaatgaaggttctcaataagataacggtggtccagaagcgaaaaaccgcggaacacaccaaaacggagagagtggtactggaggccattcaacgtaatcccttcctcgtgagtctacactacgccttccaatcctcatcaaagctttacctcgtgctagactttgccaatggcggtgagctcttcacgcatctctaccactctgagaactttgaggagtcccgggtgcgtgtgtacatagccgaggtggtgctggccctggagcaactgcatcagttggggatcatctatcgagatattaagttggagaatattttgcttgatggcgaggggcacattgttctgtccgactttggactgtcgaagatccttaccgcggagaatgaataccgtgcgcatagcttctgcggcactctggagtatatggcacctgagataatccgtacggggccgccaggacacgacagtgccgtggactggtggtcggtgggtgtgctcacttttgagctgctcaccggcgcttcgccattcgccacgtccgacggccaggtccagcaatcggaaatctcgcggcggattcagaaggagcagccaatgattccctcatcgttcagtgccaacgcccgcgactttgtgctaaagatgttggaaaagaatccaaagcggcgcttgggtggcaaccatcgcgacgccagcgaaatcaaggagcaccccttcttcaacggcattaactggcaggagttgcggacaaagcgccgcaaagccccctataagcccaccctcaccgccgaggacgatgtgcagaacttcagcaacgagtttaccgaccaagtgcccgaggatcccgagtgcgatgctccgcccagccggatacgactatttcgcggttacacatacgtggcgccagagcatttggagcagatgcgaagggataaccactgtgagattcaatactttaatacaggacttcagaatataccttgtcggccagatgatcttgaattgggcacacgcacttcaaacggagcctatggcacatgccattttgtggtggacagctctacggatttggtgtttttggccaaaataataccgctatccaagttccgcccctccgaggtcgacgcgctgatctcgtgcgctctcgacacgaccaatcacaaaaatatcgtaagctaccatggaacgttcagggaaaagtgcgagacatggatcgttatggagtacctgtccggcccggagctgaccgcatccattcgcatggatgaggattcgtgtcgggagatctttctgcagctggtcatggctgtgcggcacatacactccaagcactttatacacggtgacctgaaaccggagaacataatgttcgagaaccgagaggataggactgtcaaactgatcgattttggcagcgcatgttacaataatcgctttaagagctggaaggacaagccgcgctacacgctggactatgctccgccagaaatgctcgcggatgcgaatctcgttacttattcgccagccgtggatatatacggtcttggggccacgctgtataccatgctggtgggtcatcggccgtacagacagaacgaagacgatgtggatcattccgcagcggcccatcacgagcttcgaaagcgaatgcgccggggaacgtttaatcagcgttctatgcgctgggagagtgcaagtcctgcgttccgacatttggttagctggtgtctgcagcgggatccggctgatcggcccacattgtcagatattctcgacagcgagtggctgcagtacggctcaaatgatccggacgtggatatcattctgccacaacagatggttgtggacctcagcgaagacactatggaacaaccgacgggaggtatgttcgacgatcagcaacaactggaattcatgcacgacaagtcggcggaggatgagggcataaccctagtcagcgagcccatggatacgactgtcgcgactcacgagtctaggagaaatgcagccgcattttcgtcggtagttgctccaaccaccgacgacgagatagtgcacgaacgatttgacccggcatttgaggtccaagcggacttctacggtttcgacgagaatgcgccgcctctgcctctgcccgaggagtactactccgaactacctctgccagaggaggaccggcagtacataccacctccaccagcactgattcctgttgaaccagaaacgaccttccgacggccaagaacacgccagcagcgtcgcactgaaagccagctagtacaacctgtttccgtcgctacgtatgaggacagcaaggcgtccctgcgcgtactaatgcaacagctgccgccgccaggtgacaatgtggtagcacgcattccgaagagaacacatcgagtcgtacgtacattgcctccgacctttggaaccaccaagcgagaagagaatttctatggatttagtaagacagcaatatcgtggcgaaagactcgggccagctggcgtcacttctgtctgcttatcaatggtgtgcagcaggtgcttaaggttcggttcaaaaaagcgcgtcgcgtctactgcctgccccatataaaagaggaaaaacttgatcatgcgtacgaaaaaccgttgacgttcccgcggccaaaggcacaactgaagcgcaccaagcgggagcccaaggtgccgcggccaccgactcgagttcagccggagagggcgcgggcaatgcgtcaactttatcagttccaatgacatgaggatgacgacggcgatgatgtggaggtggtggaaatcaaggaggagccgcgaaaggagggagaggagcaactgcgagcggtgctgcagtgggagggcgacttcaggaggccacggatgtacagctgaccacactcatcgacgcaatggcccatccaggacaatgacaaccagacgccggccaaaacagagggtaaagaaccagagggtttcagtgacccacaagaaacccactagcccccctcatgagggggaaggatccgcaagacgcaccaaagatcctgtcaatacagtttttcaagtttgttattcattaggttaagcttcagaactcatttcgcttatcgtttttttcaatcacgaaaaacaaaaagcaacttaacgtttacacctttagaaggacggtcggtgtattcaatatgcaatttgttgtgctagttaattatttgaatagcttaaatgtaaaaagtcagacacaaaacgggaatataacaaaggcaacttttgcattgatcttagcgcgattaagacatacaaaaacaaataccgacaacagaacacaaccaactaatatgataataagatttgcaattagtttagtgcaaaattatgattaagacaaaattgagaaagatattcttagggcgcctatattatatacactacacacacagtttgcttttagttgtgctttatgttaagttatatacattattcttaacacactatccctgaactaactaaaaaaaaaagaaatacttccaagcatgtattgccaaatgcaatatgaattagctaacacatttaaatgtaattgtgcttggcaatgttatctaattgcattcaattaatttcagttaaaactaaggggaaaaagaagcctcgcccgaaaaaccatttccacatgaaattgcgaagctcttctttgagatcgtgtcgaaaatataacgtttttcgcacacaaaactcaactattggggaaacgtgaatagtcgtagacatttgttgatggcaaacaaagatttaattgttttgttaagtatttttgatgtatattttttatttttctgaaaattctgtatctaaataagataaagcaatggatagcgatgaaatctaaataaaacttaaacaattatattattttaaactcgcttgatttgatttgtattgttttcagtttgtatggcccgcatttggtcagtttttaagagcaccccacttaaaccctccgctgacataaacttttaaaccctaacccaaaatccaattcacatatcgaactgtataaaatttgcgttagagctggataataaagaaggaaactgattgttgaggtcatggtgtaaattttagtataaaacaaataacatttatattaaaagttgccttctaacaagttgccttagaacacacacaaatgtaaagcccaataactccaaaaagtcgcaatatgaaaagttaaacataccctttacattttataagcaaactcattcggtatgagtttagtttttatgggtgcgatcattggcaatccgtcgtagtttaagatcactggaactatcaatgaccatagaatctgcccaatctacacttacaatggacgcaacaaccgatgggggacaattagttaaatgtaagaataaagcaatcaaatcgtattgaactcgatttttgcagttcggccaaagcatagttatgttaaccaaacaatcgaaggcgtttgattgattaacattgaagatcagtggagacggaggcatggagttgaatatgaaacaagttgctagcggttaagtcaccaaagtctgtacataaaaacaatatcaaaatgcagttaaaataaagcatttcaaatgataagcaaa

SEQ ID NO: 144 - protein, 1207 aa, Drosophila melanogaster [sequence omitted]

SEQ ID NO: 145 - DNA, 1429 bp, Drosophila melanogaster
ccgtacgcttcgcagttgtttcaagttgtctaagggacatacgattttttttgcctctgcgtcacgattttaacccaaaagcgagtttagttacatgtacattattattagataaagaagtatcgcgaatacttcagttgaataaactgtgcttggtttttgggtgaggatttgtggaaagtagagtgcgcgataaccgtaactttcgacccggattttcgccatgttccgcagcaacttggagggcagtggcgcagcagcagtaggtgttgcaaatcccccctcgttggctcagtctggaaagattttccaattgcaggataacttttctgcttttcacgccagaggagggctcaacattctgggcctgcaggacatgtatttggataccagtggggccaactcgtcggccactttgagtccgcccattacgccggtgacccctgacccgtcgacgtctgcgcagtcgacgcacttcccttttctggccgacagcgcagccaccgccaattcgctccttatgcagcgacagtaccactaccacttgctgctccagcagcagcagcaactggccatggcgcagcaccaattggcgctggctgcatcagcggcagcggctagtgcgagtcaccagcaaacggacgagattgcgcgatccttgaaaatctttgcgcaggtgacgacgggcgcagcagaaaatgcggctggctcgatgcaggatgtgatgcaggagttcgcgaccaatggctatgccagcgatgatctcggtcgcatgtcctacgggagtgctccgccacaggtgcaaatgccaccgcagcagcagcatcagcaacagcaggggctgcacctgccactgggccgcaatcctgcccagctgcagaccaatggcggcaacttaatgcccattccactcgccacccactggctgaacaactaccgggagcatctgaacaacgtgtggcgaaacatgtcgtatataccagccgctcccaatacaatgggtttgcaggcccaaacagcggccactgtgtccaccaatctcggcgtgggaatgggtctgggattgcccgtgcagggcgaacagctgcgcggagcttccaattccagtaacaataataacaacaacaacaaggtgtacaagcgttacaacagcaaggccaaagagatcagccgccactgcgtcttttgtgagaataacaacgaaccagaggcggttatcaatagccactcagtgcgagataactttaaccgagtgctgtgccccaaactacgcacctacgtgtgccccatctgcggggcatctggggactcggcgcacacgattaagtactgccccaagaagccgatcatcaccatggaggatgcgatcaaggcggaatcgttccgcctagccaagagcagttactacaagcaacagatgaaggtttag

SEQ ID NO: 146 - protein, 401 aa, Drosophila melanogaster
MFRSNLEGSGAAAVGVANPPSLAQSGKIFQLQDNFSAFHARGGLNILGLQDMYLDTSGANSSATLSPPITPVTPDPSTSAQSTHFPFLADSAATANSLLMQRQYHYHLLLQQQQQLAMAQHQLALAASAAAASASHQQTDEIARSLKIFAQVTTGAAENAAGSMQDVMQEFATNGYASDDLGRMSYGSAPPQVQMPPQQQHQQQQGLHLPLGRNPAQLQTNGGNLMPIPLATHWLNNYREHLNNVWRNMSYIPAAPNTMGLQAQTAATVSTNLGVGMGLGLPVQGEQLRGASNSSNNNNNNNKVYKRYNSKAKEISRHCVFCENNNEPEAVINSHSVRDNFNRVLCPKLRTYVCPICGASGDSAHTIKYCPKKPIITMEDAIKAESFRLAKSSYYKQQMKV

SEQ ID NO: 147 - DNA, 26 bp, Drosophila melanogaster
tgaaccactcggaaccatttgagcga

SEQ ID NO: 148 - DNA, 31 bp, Drosophila melanogaster
cgatcgggaccaccttatgttatttcatcat

SEQ ID NO: 149 - DNA, 26 bp, Drosophila melanogaster
ccagattggcgggcattcacataagt
